(19) United States
(12) Patent Application Publication
(10) Pub. No.: US 2002/0042096 A1
(43) Pub. Date: Apr. 11, 2002

(54) Nucleic acids, proteins, and antibodies

(76) Inventors: Craig A. Rosen, Laytonsville, MD (US); Steven M. Ruben, Olney, MD (US); Steven C. Barash, Rockville, MD (US)

Correspondence Address: HUMAN GENOME SCIENCES INC, 9410 KEY WEST AVENUE, ROCKVILLE, MD, 20850

(21) Appl. No.: 09/764,887

(22) Filed: Jan. 17, 2001

Related U.S. Application Data
(60) Provisional application No. 60/179,065, filed on Jan. 31, 2000.
(60) Provisional application No. 60/180,628, filed on Feb. 4, 2000.
(60) Provisional application No. 60/214,886, filed on Jun. 28, 2000.
(60) Provisional application No. 60/217,487, filed on Jul. 11, 2000.
(60) Provisional application No. 60/225,758, filed on Aug. 14, 2000.
(60) Provisional application No. 60/220,963, filed on Jul. 26, 2000.
(60) Provisional application No. 60/217,496, filed on Jul. 11, 2000.
(60) Provisional application No. 60/225,447, filed on Aug. 14, 2000.
(60) Provisional application No. 60/218,290, filed on Jul. 14, 2000.
(60) Provisional application No. 60/225,757, filed on Aug. 14, 2000.
(60) Provisional application No. 60/226,868, filed on Aug. 22, 2000.
(60) Provisional application No. 60/216,647, filed on Jul. 7, 2000.
(60) Provisional application No. 60/225,267, filed on Aug. 14, 2000.
(60) Provisional application No. 60/216,880, filed on Jul. 7, 2000.
(60) Provisional application No. 60/225,270, filed on Aug. 14, 2000.
(60) Provisional application No. 60/251,869, filed on Dec. 8, 2000.
(60) Provisional application No. 60/235,834, filed on Sep. 27, 2000.
(60) Provisional application No. 60/234,274, filed on Sep. 21, 2000.
(60) Provisional application No. 60/234,223, filed on Sep. 21, 2000.
(60) Provisional application No. 60/228,924, filed on Aug. 30, 2000.
(60) Provisional application No. 60/224,518, filed on Aug. 14, 2000.
(60) Provisional application No. 60/236,369, filed on Sep. 29, 2000.
(60) Provisional application No. 60/224,519, filed on Aug. 14, 2000.
(60) Provisional application No. 60/220,964, filed on Jul. 26, 2000.
(60) Provisional application No. 60/241,809, filed on Oct. 20, 2000.
(60) Provisional application No. 60/249,299, filed on Nov. 17, 2000.
(60) Provisional application No. 60/236,327, filed on Sep. 29, 2000.
(60) Provisional application No. 60/241,785, filed on Oct. 20, 2000.
(60) Provisional application No. 60/244,617, filed on Nov. 1, 2000.
(60) Provisional application No. 60/225,268, filed on Aug. 14, 2000.
(60) Provisional application No. 60/236,368, filed on Sep. 29, 2000.
(60) Provisional application No. 60/251,856, filed on Dec. 8, 2000.
(60) Provisional application No. 60/251,868, filed on Dec. 8, 2000.
(60) Provisional application No. 60/229,344, filed on Sep. 1, 2000.
(60) Provisional application No. 60/234,997, filed on Sep. 25, 2000.
(60) Provisional application No. 60/229,343, filed on Sep. 1, 2000.
(60) Provisional application No. 60/229,345, filed on Sep. 1, 2000.
(60) Provisional application No. 60/229,287, filed on Sep. 1, 2000.
(60) Provisional application No. 60/229,513, filed on Sep. 5, 2000.
(60) Provisional application No. 60/231,413, filed on Sep. 8, 2000.
(60) Provisional application No. 60/229,509, filed on Sep. 5, 2000.
(60) Provisional application No. 60/236,367, filed on Sep. 29, 2000.
(60) Provisional application No. 60/237,039, filed on Oct. 2, 2000.
(60) Provisional application No. 60/237,038, filed on Oct. 2, 2000.
(60) Provisional application No. 60/236,370, filed on Sep. 29, 2000.
(60) Provisional application No. 60/236,802, filed on Oct. 2, 2000.
(60) Provisional application No. 60/237,037, filed on Oct. 2, 2000.
(60) Provisional application No. 60/237,040, filed on Oct. 2, 2000.
(60) Provisional application No. 60/240,960, filed on Oct. 20, 2000.
(60) Provisional application No. 60/239,935, filed on Oct. 13, 2000.

(51) Int. Cl. C12P 21/02; C12N 5/06; C12N 15/74; C07H 21/04

(52) U.S. Cl. 435/69.1; 435/325; 435/320.1; 536/23.2

(57) ABSTRACT

The present invention relates to novel liver related polynucleotides and the polypeptides encoded by these polynucleotides herein collectively known as “liver antigens,” and the use of such liver antigens for detecting disorders of the liver, particularly the presence of cancer of liver and cancer metastases. More specifically, isolated liver associated nucleic acid molecules are provided encoding novel liver associated polypeptides. Novel liver polypeptides and antibodies that bind to these polypeptides are provided. Also provided are vectors, host cells, and recombinant and synthetic methods for producing human liver associated polynucleotides and/or polypeptides. The invention further relates to diagnostic and therapeutic methods useful for diagnosing, treating, preventing and/or prognosing disorders related to the liver, including cancer of liver tissues, and therapeutic methods for treating such disorders. The invention further relates to screening methods for identifying agonists and antagonists of polynucleotides and polypeptides of the invention. The present invention further relates to methods and/or compositions for inhibiting the production and function of the polypeptides of the present invention.

### STATEMENT UNDER 37 C.F.R. §1.77(b)(4)

[0001] This application refers to a “Sequence Listing” listed below, which is provided as an electronic document on two identical compact discs (CD-R), labeled “Copy 1” and “Copy 2.” These compact discs each contain the following files, which are hereby incorporated in their entirety herein:

| Document | File Name | Size in bytes | Date of Creation |
|---|---|---|---|
| Sequence Listing | PA113_seqList.txt | 1,068,745 | 01/12/2001 |
| V Viewer Setup File | SetupDLL.exe | 695,808 | 12/19/2000 |
| V Viewer Help File Controller | v.cnt | 7,984 | 01/05/2001 |
| V Viewer Program File | v.exe | 753,664 | 12/19/2000 |
| V Viewer Help File | v.hlp | 447,766 | 01/05/2001 |

[0002] The Sequence Listing may be viewed on an IBM-PC machine running the MS-Windows operating system by using the V viewer software, licensed by HGS, Inc., included on the compact discs (see World Wide Web URL: http://www.fileviewer.com).

### FIELD OF THE INVENTION

[0003] The present invention relates to novel liver related polynucleotides, the polypeptides encoded by these polynucleotides herein collectively referred to as “liver antigens,” and antibodies that immunospecifically bind these polypeptides, and the use of such liver polynucleotides, antigens, and antibodies for detecting, treating, preventing and/or prognosing disorders of the liver, including, but not limited to, the presence of liver cancer and liver cancer metastases. More specifically, isolated liver nucleic acid molecules are provided encoding novel liver polypeptides. Novel liver polypeptides and antibodies that bind to these polypeptides are provided. Also provided are vectors, host cells, and recombinant and synthetic methods for producing human liver polynucleotides, polypeptides, and/or antibodies. The invention further relates to diagnostic and therapeutic methods useful for diagnosing, treating, preventing and/or prognosing disorders related to the liver, including liver cancer, and therapeutic methods for treating such disorders. The invention further relates to screening methods for identifying agonists and antagonists of polynucleotides and polypeptides of the invention. The invention further relates to methods and/or compositions for inhibiting or promoting the production and/or function of the polypeptides of the invention.

### BACKGROUND OF THE INVENTION

[0004] A variety of agents, including viruses, drugs, environmental pollutants, genetic disorders, and systemic diseases, can affect the liver. The resulting disorders usually affect one of the three functional components of the liver: the hepatocyte (liver cell) itself, the bile secretory (cholangiolar) apparatus, or the blood vascular system. Most acute liver diseases are self-limited, and liver functioning returns to normal once the causes are removed or eliminated. In some cases, however, the acute disease process destroys massive areas of liver tissue in a short time, leading to extensive death (necrosis) of hepatic cells and often to death of the patient. Hepatitis may result from viral infections or toxic damage from drugs or poisons. When acute hepatitis lasts for six months or more, a slow but progressive destruction of the surrounding liver cells and bile ducts occurs, a stage called chronic active hepatitis. If hepatocellular damage is severe enough to destroy entire acini (clusters of lobules), they are often replaced with fibrous scar tissue. Bile canaliculi and hepatocytes regenerate in an irregular fashion adjacent to the scar tissue and result in a chronic condition called cirrhosis of the liver. Where inflammatory activity continues after the onset of cirrhosis, the disorderly regeneration of hepatocytes and cholangioles may lead to the development of hepatocellular or cholangiolar cancer.

[0005] Although a number of viruses affect the liver, including the cytomegalovirus of infancy and childhood and the Epstein-Barr virus of infectious mononucleosis, there are three distinctive transmissible viruses that are specifically known to cause acute damage to liver cells: hepatitis virus A (HAV), hepatitis virus B (HBV), and hepatitis virus non-A, non-B (NANB). The symptoms characteristic of the acute hepatitis caused by the HAV, HBV, and NANB viruses are essentially indistinguishable from one another.

[0006] Acute hepatitis also may be caused by the overconsumption of alcohol or other poisons, such as commercial solvents (e.g., carbon tetrachloride), acetaminophen, and certain fungi. Such agents are believed to cause hepatitis when the formation of their toxic intermediate metabolites in the liver cell (phase I reactions) is beyond the capacity of the hepatocyte to conjugate, or join them with another substance for detoxification (phase II reactions) and excretion. Acute canalicular (cholestatic) hepatitis is most commonly caused by certain drugs, such as chlorpromazine, that lead to idiosyncratic reactions or, at times, by hepatitis viruses. Acute congestive liver disease usually results from the sudden engorgement of the liver by fluids after congestive heart failure.

[0007] A prominent autoimmune liver disease is Wilson's disease, which is caused by abnormal deposits of large amounts of copper in the liver. Granulomatous hepatitis, a condition in which localized areas of inflammation (granulomas) appear in any portion of the liver lobule, is a type of inflammatory disorder associated with many systemic diseases, including tuberculosis, sarcoidosis, schistosomiasis, and certain drug reactions. Granulomatous hepatitis rarely leads to serious interference with hepatic function, although it is often chronic. The end result of many forms of chronic liver injury is cirrhosis, or scarring of liver tissue in response to previous acinar necrosis and irregular regeneration of liver nodules and bile ducts.

[0008] Primary biliary cirrhosis, a widespread, though uncommon, autoimmune inflammatory disease of bile ducts, is a disorder primarily affecting middle-aged and older women. Secondary biliary cirrhosis results from chronic obstruction or recurrent infection in the extrahepatic bile ducts caused by strictures, gallstones, or tumors. Infestation of the biliary tract with a liver fluke, Clonorchis sinensis, is a cause of secondary biliary cirrhosis in Asia.

[0009] Portal hypertension, the increased pressure in the portal vein and its tributaries that is the result of impediments to venous flow into the liver, is brought about by the scarring characteristic of the cirrhotic process. The increased pressure causes feeders of the portal vein to distend markedly, producing varices, or dilations of the veins. When varices are located in superficial tissues, they may rupture and bleed profusely. Two such locations are the lower esophagus and the perianal region. The accumulation of fluid in the abdominal cavity, or ascites, is related to portal hypertension, significant reduction in serum albumin, and renal retention of sodium. When albumin levels in blood are lower than normal, there is a marked reduction in the force that holds plasma water within the blood vessels and normally resists the effects of the intravascular pressure. The resulting increase in intravascular pressure, coupled with the increased internal pressure caused by the portal venous obstruction in the liver, leads to massive losses of plasma water into the abdominal cavity. The associated reduction of blood flow to the kidneys causes increased elaboration of the hormone aldosterone, which, in turn, causes the retention of sodium and water and a reduction in urinary output. In addition, because the movement of intestinal lymph into the liver is blocked by the cirrhotic process in the liver, the backflow of this fluid into the abdominal cavity is greatly increased. A progressive reduction in kidney function that often occurs in persons with advanced acute or chronic liver disease, hepatorenal syndrome, probably results from an inadequate perfusion of blood through the cortical (outer) portions of the kidneys, where most removal of waste products occurs. With advanced hepatocytic dysfunction, a spasm of blood vessels in the renal cortex can occur, often with good blood flow to the rest of the kidney. This spasm results in progressive failure in kidney function and often leads to death.

[0010] Although not uncommon, cancer originating in the liver, usually in hepatocytes and less frequently in cells of bile duct origin, is rare in the West and is almost always associated with active cirrhosis, particularly the form found in patients with chronic hepatitis. Long exposure to certain environmental poisons, such as vinyl chloride or carbon tetrachloride, has also been shown to lead to hepatic cancer. Cancers arising elsewhere in the body, particularly in abdominal organs, lungs, and lymphoid tissue, commonly lead to metastatic cancer in the liver and are by far the most frequent type of hepatic malignancy. Various benign types of tumors and cysts arise from certain components of the liver, such as the hepatocytes (adenomas) or blood vessels (hemangiomas). While the cause of these lesions is not always clear, hepatic adenomas are associated with the prolonged use of female sex hormones (estrogens). Benign cysts in the liver may occur as congenital defects or as the result of infections from infestation of the dog tapeworm (Echinococcus granulosus). Abscesses on the liver result from the spread of infection from the biliary tract or from other parts of the body, especially the appendix and the pelvic organs. Specific liver abscesses also result from infections with the intestinal parasite Enitanoeba histolytica.

[0011] The discovery of new human liver associated polynucleotides, the polypeptides encoded by them, and antibodies that immunospecifically bind these polypeptides, satisfies a need in the art by providing new compositions which are useful in the diagnosis, treatment, prevention and/or prognosis of disorders of the liver, including, but not limited to, infections (e.g., infections due to viruses, such as, cytomegalovirus, Epstein-Barr, hepatitis A virus, hepatitis B virus, hepatitis non-A, non-B; infections due to fungi; infections due to bacteria; infections due to parasites, such as, Clonorchis sinensis, Echinococcus granulosus, Entamoeba histolytica), inflammations (e.g., cirrhosis, acute hepatitis, granulomatous hepatitis), disorders due to toxin damage (such as, exposure to poisons, drugs (such as, acetaminophen, chlorpromazine), environmental poisons (such as, carbon tetrachloride or vinyl chloride)) (e.g., acute canalicular hepatitis), autoimmune diseases (e.g., Wilson's disease, primary biliary cirrhosis), neoplastic disorders (e.g., adenomas, hemangiomas, hepatocellular carcinoma), and/or as described under “Gastrointestinal Disorders” below.

### SUMMARY OF THE INVENTION

[0012] The present invention relates to novel liver related polynucleotides, the polypeptides encoded by these polynucleotides herein collectively referred to as “liver antigens,” and antibodies that immunospecifically bind these polypeptides, and the use of such liver polynucleotides, antigens, and antibodies for detecting, treating, preventing and/or prognosing disorders of the liver, including, but not limited to, the presence of liver cancer and liver cancer metastases. More specifically, isolated liver nucleic acid molecules are provided encoding novel liver polypeptides. Novel liver polypeptides and antibodies that bind to these polypeptides are provided. Also provided are vectors, host cells, and recombinant and synthetic methods for producing human liver polynucleotides, polypeptides, and/or antibodies. The invention further relates to diagnostic and therapeutic methods useful for diagnosing, treating, preventing and/or prognosing disorders related to the liver, including liver cancer, and therapeutic methods for treating such disorders. The invention further relates to screening methods for identifying agonists and antagonists of polynucleotides and polypeptides of the invention. The invention further relates to methods and/or compositions for inhibiting or promoting the production and/or function of the polypeptides of the invention.

### DETAILED DESCRIPTION

### Tables

[0013] Table 1A summarizes some of the polynucleotides encompassed by the invention (including cDNA clones related to the sequences (Clone ID NO:Z), contig sequences (contig identifier (Contig ID:) and contig nucleotide sequence identifier (SEQ ID NO:X)) and further summarizes certain characteristics of these polynucleotides and the polypeptides encoded thereby. The first column provides a unique clone identifier, “Clone ID NO:Z”,for a cDNA plasmid related to each liver associated contig sequence disclosed in Table 1A. The second column provides a unique contig identifier, “Contig ID:” for each of the contig sequences disclosed in Table 1A. The third column provides the sequence identifier, “SEQ ID NO:X”, for each of the contig polynucleotide sequences disclosed in Table 1A. The fourth column, “ORF (From-To)”, provides the location (i.e., nucleotide position numbers) within the polynucleotide sequence of SEQ ID NO:X that delineate the preferred open reading frame (ORF) shown in the sequence listing and referenced in Table 1A as SEQ ID NO:Y (column 5). Column 6 lists residues comprising predicted epitopes contained in the polypeptides encoded by each of the preferred ORFs (SEQ ID NO:Y). Identification of potential immunogenic regions was performed according to the method of Jameson and Wolf (CABIOS, 4:181-186 (1988)); specifically, the Genetics Computer Group (GCG) implementation of this algorithm, embodied in the program PEPTIDESTRUCTURE (Wisconsin Package v10.0, Genetics Computer Group (GCG), Madison, Wis.). This method returns a measure of the probability that a given residue is found on the surface of the protein. Regions where the antigenic index score is greater than 0.9 over at least 6 amino acids are indicated in Table 1A as “Predicted Epitopes.” In particular embodiments, liver associated polypeptides of the invention comprise, or alternatively consist of, one, two, three, four, five or more of the predicted epitopes described in Table 1A. It will be appreciated that depending on the analytical criteria used to predict antigenic determinants, the exact address of the determinant may vary slightly. Column 7, “Tissue Distribution” shows the expression profile of tissue, cells, and/or cell line libraries which express the polynucleotides of the invention. The first number in column 7 (preceding the colon), represents the tissue/cell source identifier code corresponding to the code and description provided in Table 4. Expression of these polynucleotides was not observed in the other tissues and/or cell libraries tested. For those identifier codes in which the first two letters are not “AR”, the second number in column 7 (following the colon), represents the number of times a sequence corresponding to the reference polynucleotide sequence (e.g., SEQ ID NO:X) was identified in the tissue/cell source. Those tissue/cell source identifier codes in which the first two letters are “AR” designate information generated using DNA array technology. Utilizing this technology, cDNAs were amplified by PCR and then transferred, in duplicate, onto the array. Gene expression was assayed through hybridization of first strand cDNA probes to the DNA array. cDNA probes were generated from total RNA extracted from a variety of different tissues and cell lines. Probe synthesis was performed in the presence of ³³P dCTP, using oligo(dT) to prime reverse transcription. After hybridization, high stringency washing conditions were employed to remove non-specific hybrids from the array. The remaining signal, emanating from each gene target, was measured using a Phosphorimager. Gene expression was reported as Phosphor Stimulating Luminescence (PSL) which reflects the level of phosphor signal generated from the probe hybridized to each of the gene targets represented on the array. A local background signal subtraction was performed before the total signal generated from each array was used to normalize gene expression between the different hybridizations. The value presented after “[array code]:” represents the mean of the duplicate values, following background subtraction and probe normalization. One of skill in the art could routinely use this information to identify normal and/or diseased tissue(s) which show a predominant expression pattern of the corresponding polynucleotide of the invention or to identify polynucleotides which show predominant and/or specific tissue and/or cell expression. Column 8, “Cytologic Band,” provides the chromosomal location of polynucleotides corresponding to SEQ ID NO:X. Chromosomal location was determined by finding exact matches to EST and cDNA sequences contained in the NCBI (National Center for Biotechnology Information) UniGene database. Given a presumptive chromosomal location, disease locus association was determined by comparison with the Morbid Map, derived from Online Mendelian Inheritance in Man (Online Mendelian Inheritance in Man, OMIM™. McKusick-Nathans Institute for Genetic Medicine, Johns Hopkins University (Baltimore, Md.) and National Center for Biotechnology Information, National Library of Medicine (Bethesda, Md.) 2000. World Wide Web URL: http://www.ncbi.nlm.nih.gov/omim/). If the putative chromosomal location of the Query overlapped with the chromosomal location of a Morbid Map entry, an OMIM identification number is provided in column 9 labeled “OMIM Disease Reference(s)”. A key to the OMIM reference identification numbers is provided in Table 5.

[0014] Table 1B summarizes additional polynucleotides encompassed by the invention (including cDNA clones related to the sequences (Clone ID NO:Z), contig sequences (contig identifier (Contig ID:) contig nucleotide sequence identifiers (SEQ ID NO:X)), and genomic sequences (SEQ ID NO:B). The first column provides a unique clone identifier, “Clone ID NO:Z”, for a cDNA clone related to each contig sequence. The second column provides the sequence identifier, “SEQ ID NO:X”, for each contig sequence. The third column provides a unique contig identifier, “Contig ID:” for each contig sequence. The fourth column, provides a BAC identifier “BAC ID NO:A” for the BAC clone referenced in the corresponding row of the table. The fifth column provides the nucleotide sequence identifier, “SEQ ID NO:B” for a fragment of the BAC clone identified in column four of the corresponding row of the table. The sixth column, “Exon From-To”, provides the location (i.e., nucleotide position numbers) within the polynucleotide sequence of SEQ ID NO:B which delineate certain polynucleotides of the invention that are also exemplary members of polynucleotide sequences that encode polypeptides of the invention (e.g., polypeptides containing amino acid sequences encoded by the polynucleotide sequences delineated in column six, and fragments and variants thereof).

[0015] Table 2 summarizes homology and features of some of the polypeptides of the invention. The first column provides a unique clone identifier, “Clone ID NO:Z”, corresponding to a cDNA disclosed in Table 1A. The second column provides the unique contig identifier, “Contig ID:” corresponding to contigs in Table 1A and allowing for correlation with the information in Table 1A. The third column provides the sequence identifier, “SEQ ID NO:X”, for the contig polynucleotide sequences. The fourth column provides the analysis method by which the homology/identity disclosed in the row was determined. Comparisons were made between polypeptides encoded by the polynucleotides of the invention and either a non-redundant protein database (herein referred to as “NR”), or a database of protein families (herein referred to as “PFAM”)as further described below. The fifth column provides a description of PFAM/NR hits having significant matches to a polypeptide of the invention. Column six provides the accession number of the PFAM/NR hit disclosed in the fifth column. Column seven, “Score/Percent Identity”, provides a quality score or the percent identity, of the hit disclosed in column five. Columns 8 and 9, “NT From” and “NT To” respectively, delineate the polynucleotides in “SEQ ID NO:X” that encode a polypeptide having a significant match to the PFAM/NR database as disclosed in the fifth column. In specific embodiments, polypeptides of the invention comprise, or alternatively consist of, an amino acid sequence encoded by the polynucleotides in SEQ ID NO:X as delineated in columns 8 and 9, or fragments or variants thereof.

[0016] Table 3 provides polynucleotide sequences that may be disclaimed according to certain embodiments of the invention. The first column provides a unique clone identifier, “Clone ID NO:Z”, for a cDNA clone related to liver associated contig sequences disclosed in Table 1A. The second column provides the sequence identifier, “SEQ ID NO:X”, for contig polynucleotide sequences disclosed in Table 1A. The third column provides the unique contig identifier, “Contig ID”, for contigs disclosed in Table 1A. The fourth column provides a unique integer ‘a’ where ‘a’ is any integer between 1 and the final nucleotide minus 15 of SEQ ID NO:X, represented as “Range of a”, and the fifth column provides a unique integer ‘b’ where ‘b’ is any integer between 15 and the final nucleotide of SEQ ID NO:X, represented as “Range of b”, where both a and b correspond to the positions of nucleotide residues shown in SEQ ID NO:X, and where b is greater than or equal to a +14. For each of the polynucleotides shown as SEQ ID NO:X, the uniquely defined integers can be substituted into the general formula of a-b, and used to describe polynucleotides which may be preferably excluded from the invention. In certain embodiments, preferably excluded from the polynucleotides of the invention (including polynucleotide fragments and variants as described herein and diagnostic and/or therapeutic uses based on these polynucleotides) are at least one, two, three, four, five, ten, or more of the polynucleotide sequence(s) having the accession number(s) disclosed in the sixth column of this Table (including for example, published sequence in connection with a particular BAC clone). In further embodiments, preferably excluded from the invention are the specific polynucleotide sequence(s) contained in the clones corresponding to at least one, two, three, four, five, ten, or more of the available material having the accession numbers identified in the sixth column of this Table (including for example, the actual sequence contained in an identified BAC clone).

[0017] Table 4 provides a key to the tissue/cell source identifier code disclosed in Table 1A, column 7. Column 1 provides the key to the tissue/cell source identifier code disclosed in Table 1A, Column 7. Columns 2-5 provide a description of the tissue or cell source. Codes corresponding to diseased tissues are indicated in column 6 with the word “disease”. The use of the word “disease” in column 6 is non-limiting. The tissue or cell source may be specific (e.g. a neoplasm), or may be disease-associated (e.g., a tissue sample from a normal portion of a diseased organ). Furthermore, tissues and/or cells lacking the “disease” designation may still be derived from sources directly or indirectly involved in a disease state or disorder, and therefore may have a further utility in that disease state or disorder. In numerous cases where the tissue/cell source is a library, column 7 identifies the vector used to generate the library.

[0018] Table 5 provides a key to the OMIM™ reference identification numbers disclosed in Table 1A, column 9. OMIM reference identification numbers (Column 1) were derived from Online Mendelian Inheritance in Man (Online Mendelian Inheritance in Man, OMIM™. McKusick-Nathans Institute for Genetic Medicine, Johns Hopkins University (Baltimore, Md.) and National Center for Biotechnology Information, National Library of Medicine, (Bethesda, Md.) 2000. World Wide Web URL: http://www.ncbi.nlm.nih.gov/omim/). Column 2 provides diseases associated with the cytologic band disclosed in Table 1A, column 8, as determined from the Morbid Map database.

[0019] Table 6 summarizes ATCC Deposits, Deposit dates, and ATCC designation numbers of deposits made with the ATCC in connection with the present application.

[0020] Table 7 shows the cDNA libraries sequenced, tissue source description, vector information and ATCC designation numbers relating to these cDNA libraries.

[0021] Table 8 provides a physical characterization of clones encompassed by the invention. The first column provides the unique clone identifier, “Clone ID NO:Z”, for certain cDNA clones of the invention, as described in Table 1A. The second column provides the size of the cDNA insert contained in the corresponding cDNA clone.

### Definitions

[0022] The following definitions are provided to facilitate understanding of certain terms used throughout this specification.

[0023] In the present invention, “isolated” refers to material removed from its original environment (e.g., the natural environment if it is naturally occurring), and thus is altered “by the hand of man” from its natural state. For example, an isolated polynucleotide could be part of a vector or a composition of matter, or could be contained within a cell, and still be “isolated” because that vector, composition of matter, or particular cell is not the original environment of the polynucleotide. The term “isolated” does not refer to genomic or cDNA libraries, whole cell total or mRNA preparations, genomic DNA preparations (including those separated by electrophoresis and transferred onto blots), sheared whole cell genomic DNA preparations or other compositions where the art demonstrates no distinguishing features of the polynucleotide sequences of the present invention.

[0024] As used herein, a “polynucleotide” refers to a molecule having a nucleic acid sequence encoding SEQ ID NO:Y or a fragment or variant thereof; a nucleic acid sequence contained in SEQ ID NO:X (as described in column 3 of Table 1A) or the complement thereof; a cDNA sequence contained in Clone ID NO:Z (as described in column 1 of Table 1A and contained within a library deposited with the ATCC); a nucleotide sequence encoding the polypeptide encoded by a nucleotide sequence in SEQ ID NO:B as defined in column 6 of Table 1B or a fragment or variant thereof; or a nucleotide coding sequence in SEQ ID NO:B as defined in column 6 of Table 1B or the complement thereof. For example, the polynucleotide can contain the nucleotide sequence of the full length cDNA sequence, including the 5′ and 3′ untranslated sequences, the coding region, as well as fragments, epitopes, domains, and variants of the nucleic acid sequence. Moreover, as used herein, a “polypeptide” refers to a molecule having an amino acid sequence encoded by a polynucleotide of the invention as broadly defined (obviously excluding poly-Phenylalanine or poly-Lysine peptide sequences which result from translation of a polyA tail of a sequence corresponding to a cDNA).

[0025] As used herein, a “liver antigen” refers collectively to any polynucleotide disclosed herein (e.g., a nucleic acid sequence contained in SEQ ID NO:X or the complement thereof, or cDNA sequence contained in Clone ID NO:Z, or a nucleotide sequence encoding the polypeptide encoded by a nucleotide sequence in SEQ ID NO:B as defined in column 6 of Table 1B, or a nucleotide coding sequence in SEQ ID NO:B as defined in column 6 of Table 1B or the complement thereof and fragments or variants thereof as described herein) or any polypeptide disclosed herein (e.g., an amino acid sequence contained in SEQ ID NO:Y, an amino acid sequence encoded by SEQ ID NO:X, or the complement thereof, an amino acid sequence encoded by the cDNA sequence contained in Clone ID NO:Z, an amino acid sequence encoded by SEQ ID NO:B, or the complement thereof, and fragments or variants thereof as described herein). These liver antigens have been determined to be predominantly expressed in liver tissues, including normal or diseased tissues (as shown in Table 1A column 7 and Table 4).

[0026] In the present invention, “SEQ ID NO:X” was often generated by overlapping sequences contained in multiple clones (contig analysis). A representative clone containing all or most of the sequence for SEQ ID NO:X is deposited at Human Genome Sciences, Inc. (HGS) in a catalogued and archived library. As shown, for example, in column 1 of Table 1A, each clone is identified by a cDNA Clone ID (identifier generally referred to herein as Clone ID NO:Z). Each Clone ID is unique to an individual clone and the Clone ID is all the information needed to retrieve a given clone from the HGS library. Furthermore, certain clones disclosed in this application have been deposited with the ATCC on Oct. 5, 2000, having the ATCC designation numbers PTA 2574 and PTA 2575; and on Jan. 5, 2001, having the depositor reference numbers TS-1, TS-2, AC-1, and AC-2. In addition to the individual cDNA clone deposits, most of the cDNA libraries from which the clones were derived were deposited at the American Type Culture Collection (hereinafter “ATCC”). Table 7 provides a list of the deposited cDNA libraries. One can use the Clone ID NO:Z to determine the library source by reference to Tables 6 and 7. Table 7 lists the deposited cDNA libraries by name and links each library to an ATCC Deposit. Library names contain four characters, for example, “HTWE.” The name of a cDNA clone (Clone ID NO:Z) isolated from that library begins with the same four characters, for example “HTWEP07”. As mentioned below, Table 1A correlates the Clone ID NO:Z names with SEQ ID NO:X. Thus, starting with an SEQ ID NO:X, one can use Tables 1A, 6 and 7 to determine the corresponding Clone ID NO:Z, which library it came from and which ATCC deposit the library is contained in. Furthermore, it is possible to retrieve a given cDNA clone from the source library by techniques known in the art and described elsewhere herein. The ATCC is located at 10801 University Boulevard, Manassas, Va. 20110-2209, USA. The ATCC deposits were made pursuant to the terms of the Budapest Treaty on the international recognition of the deposit of microorganisms for the purposes of patent procedure.

[0027] In specific embodiments, the polynucleotides of the invention are at least 15, at least 30, at least 50, at least 100, at least 125, at least 500, or at least 1000 continuous nucleotides but are less than or equal to 300 kb, 200 kb, 100 kb, 50 kb, 15 kb, 10 kb, 7.5 kb, 5 kb, 2.5 kb, 2.0 kb, or 1 kb, in length. In a further embodiment, polynucleotides of the invention comprise a portion of the coding sequences, as disclosed herein, but do not comprise all or a portion of any intron. In another embodiment, the polynucleotides comprising coding sequences do not contain coding sequences of a genomic flanking gene (i.e., 5′ or 3′ to the gene of interest in the genome). In other embodiments, the polynucleotides of the invention do not contain the coding sequence of more than 1000, 500, 250, 100, 50, 25, 20, 15, 10, 5, 4, 3, 2, or 1 genomic flanking gene(s).

[0028] A “polynucleotide” of the present invention also includes those polynucleotides capable of hybridizing, under stringent hybridization conditions, to sequences contained in SEQ ID NO:X, or the complement thereof (e.g., the complement of any one, two, three, four, or more of the polynucleotide fragments described herein), the polynucleotide sequence delineated in columns 8 and 9 of Table 2 or the complement thereof, and/or cDNA sequences contained in Clone ID NO:Z (e.g., the complement of any one, two, three, four, or more of the polynucleotide fragments, or the cDNA clone within the pool of cDNA clones deposited with the ATCC, described herein) and/or the polynucleotide sequence delineated in column 6 of Table 1B or the complement thereof. “Stringent hybridization conditions” refers to an overnight incubation at 42 degree C. in a solution comprising 50% formamide, 5×SSC (750 mM NaCl, 75 mM trisodium citrate), 50 mM sodium phosphate (pH 7.6), 5×Denhardt's solution, 10% dextran sulfate, and 20 μg/ml denatured, sheared salmon sperm DNA, followed by washing the filters in 0.1×SSC at about 65 degree C.

[0029] Also contemplated are nucleic acid molecules that hybridize to the polynucleotides of the present invention at lower stringency hybridization conditions. Changes in the stringency of hybridization and signal detection are primarily accomplished through the manipulation of formamide concentration (lower percentages of formamide result in lowered stringency), salt conditions, or temperature. For example, lower stringency conditions include an overnight incubation at 37 degree C. in a solution comprising 6×SSPE (20×SSPE=3M NaCl; 0.2M NaH₂PO₄; 0.02M EDTA, pH 7.4), 0.5% SDS, 30% formamide, 100 μg/ml salmon sperm blocking DNA; followed by washes at 50 degree C. with 1×SSPE, 0.1% SDS. In addition, to achieve even lower stringency, washes performed following stringent hybridization can be done at higher salt concentrations (e.g. 5×SSC).

[0030] Note that variations in the above conditions may be accomplished through the inclusion and/or substitution of alternate blocking reagents used to suppress background in hybridization experiments. Typical blocking reagents include Denhardt's reagent, BLOTTO, heparin, denatured salmon sperm DNA, and commercially available proprietary formulations. The inclusion of specific blocking reagents may require modification of the hybridization conditions described above, due to problems with compatibility.

[0031] Of course, a polynucleotide which hybridizes only to polyA+ sequences (such as any 3′ terminal polyA+ tract of a cDNA shown in the sequence listing), or to a complementary stretch of T (or U) residues, would not be included in the definition of “polynucleotide,” since such a polynucleotide would hybridize to any nucleic acid molecule containing a poly (A) stretch or the complement thereof (e.g., practically any double-stranded cDNA clone generated using oligo dT as a primer).

[0032] The polynucleotide of the present invention can be composed of any polyribonucleotide or polydeoxribonucleotide, which may be unmodified RNA or DNA or modified RNA or DNA. For example, polynucleotides can be composed of single- and double-stranded DNA, DNA that is a mixture of single- and double-stranded regions, single- and double-stranded RNA, and RNA that is mixture of single- and double-stranded regions, hybrid molecules comprising DNA and RNA that may be single-stranded or, more typically, double-stranded or a mixture of single- and double-stranded regions. In addition, the polynucleotide can be composed of triple-stranded regions comprising RNA or DNA or both RNA and DNA. A polynucleotide may also contain one or more modified bases or DNA or RNA backbones modified for stability or for other reasons. “Modified” bases include, for example, tritylated bases and unusual bases such as inosine. A variety of modifications can be made to DNA and RNA; thus, “polynucleotide” embraces chemically, enzymatically, or metabolically modified forms.

[0033] The polypeptide of the present invention can be composed of amino acids joined to each other by peptide bonds or modified peptide bonds, i.e., peptide isosteres, and may contain amino acids other than the 20 gene-encoded amino acids. The polypeptides may be modified by either natural processes, such as posttranslational processing, or by chemical modification techniques which are well known in the art. Such modifications are well described in basic texts and in more detailed monographs, as well as in a voluminous research literature. Modifications can occur anywhere in a polypeptide, including the peptide backbone, the amino acid side-chains and the amino or carboxyl termini. It will be appreciated that the same type of modification may be present in the same or varying degrees at several sites in a given polypeptide. Also, a given polypeptide may contain many types of modifications. Polypeptides may be branched, for example, as a result of ubiquitination, and they may be cyclic, with or without branching. Cyclic, branched, and branched cyclic polypeptides may result from posttranslation natural processes or may be made by synthetic methods. Modifications include acetylation, acylation, ADP-ribosylation, amidation, covalent attachment of flavin, covalent attachment of a heme moiety, covalent attachment of a nucleotide or nucleotide derivative, covalent attachment of a lipid or lipid derivative, covalent attachment of phosphotidylinositol, cross-linking, cyclization, disulfide bond formation, demethylation, formation of covalent cross-links, formation of cysteine, formation of pyroglutamate, formylation, gamma-carboxylation, glycosylation, GPI anchor formation, hydroxylation, iodination, methylation, myristoylation, oxidation, pegylation, proteolytic processing, phosphorylation, prenylation, racemization, selenoylation, sulfation, transfer-RNA mediated addition of amino acids to proteins such as arginylation, and ubiquitination. (See, for instance, PROTEINS—STRUCTURE AND MOLECULAR PROPERTIES, 2nd Ed., T. E. Creighton, W. H. Freeman and Company, New York (1993); POSTTRANSLATIONAL COVALENT MODIFICATION OF PROTEINS, B. C. Johnson, Ed., Academic Press, New York, pgs. 1-12 (1983); Seifter et al., Meth. Enzymol. 182:626-646 (1990); Rattan et al., Ann. N.Y. Acad. Sci. 663:48-62 (1992).)

[0034] “SEQ ID NO:X” refers to a polynucleotide sequence described, for example, in Tables 1A or 2, while “SEQ ID NO:Y” refers to a polypeptide sequence described in column 5 of Table 1A. SEQ ID NO:X is identified by an integer specified in column 3 of Table 1A. The polypeptide sequence SEQ ID NO:Y is a translated open reading frame (ORF) encoded by polynucleotide SEQ ID NO:X. “Clone ID NO:Z” refers to a cDNA clone described in column 1 of Table 1A.

[0035] “A polypeptide having biological activity” refers to a polypeptide exhibiting activity similar to, but not necessarily identical to, an activity of a polypeptide of the present invention, including mature forms, as measured in a particular biological assay, with or without dose dependency. In the case where dose dependency does exist, it need not be identical to that of the polypeptide, but rather substantially similar to the dose-dependence in a given activity as compared to the polypeptide of the present invention (i.e., the candidate polypeptide will exhibit greater activity or not more than about 25-fold less and, preferably, not more than about tenfold less activity, and most preferably, not more than about three-fold less activity relative to the polypeptide of the present invention).

[0036] Table 1A summarizes some of the polynucleotides encompassed by the invention (including contig sequences (SEQ ID NO:X) and clones (Clone ID NO:Z) and further summarizes certain characteristics of these polynucleotides and the polypeptides encoded thereby.

### Polynucleotides and Polypeptides

[0037] TABLE 1A

| | | | | AA | | Tissue Distribution | | |
|---|---|---|---|---|---|---|---|---|
| | | | | SEQ | | Library code: count | | OMIM |
| Clone ID | Contig | SEQ ID | ORF | ID | | (see Table IV for | Cytologic | Disease |
| NO: Z | ID | NO: X | (From-To) | NO: Y | Predicted Epitopes | Library Codes) | Band | Reference(s): |
| HALSC22 | 503082 | 11 | 67-336 | 157 | | H0098: 2 | | |
| HALSE71 | 509638 | 12 | 53-145 | 158 | | H0098: 2 | | |
| HALSG01 | 500834 | 13 | 110-256 | 159 | Leu-8 to Tyr-15, | H0098: 2 | | |
| | | | | | Gly-24 to Thr-29. | | | |
| HALSH86 | 501004 | 14 | 3-104 | 160 | | H0098: 2 | | |
| HALSJ15 | 501008 | 15 | 167-268 | 161 | | H0098: 2 | | |
| HALSL45 | 723542 | 16 | 220-396 | 162 | Leu-24 to Thr-29, | L0756: 3, L0517: 2, | | |
| | | | | | Thr-47 to Tyr-56. | H0098: 1, H0510: 1 and | | |
| | | | | | | L0731: 1. | | |
| HALSN27 | 509759 | 17 | 145-318 | 163 | Lys-1 to Ser-6, | H0098: 2 | | |
| | | | | | Trp-35 to Asp-47. | | | |
| HALSN49 | 971590 | 18 | 1-75 | 164 | | H0098: 2 | | |
| HFLNA59 | 537447 | 19 | 101-319 | 165 | Pro-23 to Ala-30. | H0357: 2 | | |
| HFLQA82 | 757380 | 20 | 1-138 | 166 | | H0357: 2 | | |
| HFLQF55 | 719018 | 21 | 3-230 | 167 | | H0357: 1, L0157: 1, | | |
| | | | | | | H0510: 1, L0438: 1, | | |
| | | | | | | L0748: 1 and L0439: 1. | | |
| HFLSF55 | 955305 | 22 | 221-385 | 168 | Pro-1 to Asn-6. | H0197: 3, H0199: 1 | | |
| | | | | | | and H0246: 1. | | |
| HFLSH67 | 968639 | 23 | 55-192 | 169 | Asp-31 to Gly-41. | H0197: 6, H0199: 2 | | |
| | | | | | | and L0748: 1. | | |
| HFLS123 | 509743 | 24 | 282-416 | 170 | Pro-6 to Asp-11. | H0197: 2 and L0748: | | |
| | | | | | | 1. | | |
| HFLSJ61 | 507017 | 25 | 91-318 | 171 | | H0197: 2 and H0199: | | |
| | | | | | | 1. | | |
| HFLSK11 | 964908 | 26 | 3-335 | 172 | Pro-5 to Ala-12. | H0197: 1, H0199: 1 | | |
| | | | | | | and H0198: 1. | | |
| HFLSK31 | 535238 | 27 | 207-329 | 173 | Lys-1 to Gly-8, | H0197: 1 and H0246: | | |
| | | | | | Thr-23 to Val-32. | 1. | | |
| HFLSK81 | 761133 | 28 | 74-268 | 174 | Lys-13 to Asn-22. | H0199: 2 and H0197: | | |
| | | | | | | 1. | | |
| HFLUF43 | 928026 | 29 | 176-316 | 175 | Lys-38 to Arg-47. | H0199: 3, H0047: 1 | | |
| | | | | | | and H0246: 1. | | |
| HFLUF44 | 522416 | 30 | 73-396 | 176 | Gly-19 to Glu-26, | H0199: 2 | 12 | |
| | | | | | Pro-52 to Ser-58, | | | |
| | | | | | Glu-84 to Gly-94. | | | |
| HFLUG50 | 526181 | 31 | 105-200 | 177 | | H0199: 2 | | |
| HFLVE85 | 531014 | 32 | 224-376 | 178 | Pro-9 to Arg-23. | H0246: 2 | | |
| HFLV115 | 921860 | 33 | 196-441 | 179 | | H0197: 2 and H0246: | | |
| | | | | | | 2. | | |
| HFLVJ52 | 954506 | 34 | 1-108 | 180 | Arg-18 to Arg-25. | H0197: 3 and H0246: | | |
| | | | | | | 3. | | |
| HFVBA62 | 754154 | 35 | 55-330 | 181 | | H0152: 1 and H0509: | | |
| | | | | | | 1. | | |
| HFVG178 | 935839 | 36 | 1-174 | 182 | | H0393: 2 | | |
| HFVGK74 | 789130 | 37 | 53-277 | 183 | | H0393: 2 | | |
| HFVHC25 | 678573 | 38 | 85-222 | 184 | Lys-26 to Gly-36. | H0393: 2 | | |
| HFVHE45 | 572837 | 39 | 198-380 | 185 | Thr-1 to Lys-6. | H0393: 2 and L0754: | | |
| | | | | | | 1. | | |
| HFVHE66 | 572852 | 40 | 98-319 | 186 | | H0393: 2 | | |
| HFVHF81 | 929124 | 41 | 136-291 | 187 | | H0393: 2 | | |
| HFVH101 | 916970 | 42 | 214-354 | 188 | Gly-12 to Arg-20, | H0393: 2 | | |
| | | | | | Lys-35 to Phe-40. | | | |
| HFVHM86 | 572830 | 43 | 2-289 | 189 | | H0393: 2 | | |
| HFVII33 | 871980 | 44 | 2-271 | 190 | | H0393: 2 | | |
| HHLBA18 | 527530 | 45 | 51-164 | 191 | | T0091: 2 | | |
| HLDAK38 | 689904 | 46 | 91-225 | 192 | Gln-5 to Leu-11. | H0509: 3 | | |
| HLDBJ86 | 882365 | 47 | 30-452 | 193 | | H0509: 2, H0510: 1 | | |
| | | | | | | and L0774: 1. | | |
| HLDDI91 | 790003 | 48 | 258-608 | 194 | Glu-1 to Ser-18, | AR089: 0, AR061: 0 | | |
| | | | | | Lys-62 to Ile-67. | H0355: 1, H0509: 1 | | |
| | | | | | | and L0748: 1. | | |
| HLDOA63 | 949166 | 49 | 69-521 | 195 | Leu-2 to Gln-9, | AR089: 17, AR061: 16 | | |
| | | | | | Pro-11 to Gln-26, | H0510: 2, L0581: 2 | | |
| | | | | | Lys-65 to Pro-70. | and H0355: 1. | | |
| HLDOB53 | 728220 | 50 | 76-189 | 196 | | H0510: 2 | | |
| HLDOR73 | 683262 | 51 | 132-269 | 197 | Phe-7 to Asn-31. | H0510: 2 | | |
| HLDOZ69 | 697988 | 52 | 1-351 | 198 | Asn-23 to Ser-31, | H0510: 2 | | |
| | | | | | Thr-74 to Thr-82. | | | |
| HLDPA63 | 744341 | 53 | 114-257 | 199 | Arg-19 to Phe-27. | H0510: 2 | | |
| HLDQB65 | 708002 | 54 | 1-168 | 200 | Arg-1 to Trp-7, | H0510: 3 and L0731: | | |
| | | | | | Gly-12 to Gly-23, | 1. | | |
| | | | | | Ile-27 to Lys-32, | | | |
| | | | | | Arg-47 to Val-56. | | | |
| HLDQH10 | 932015 | 55 | 130-318 | 201 | | H0510: 2 and L0755: | | |
| | | | | | | 1. | | |
| HLDQQ76 | 953312 | 56 | 37-321 | 202 | Glu-22 to Ser-28, | HO510: 3, L0581: 2, | | |
| | | | | | Arg-59 to Pro-67. | L0662: 1 and L0777: 1. | | |
| HLDRD54 | 727954 | 57 | 83-265 | 203 | Val-4 to Asn-10, | H0510: 2 | | |
| | | | | | Pro-44 to Arg-50. | | | |
| HLDRE66 | 966517 | 58 | 60-206 | 204 | His-12 to Gln-17, | H0510: 2 | | |
| | | | | | Leu-39 to Thr-44. | | | |
| HLDRI94 | 784582 | 59 | 10-114 | 205 | Trp-4 to Gln-11. | L0748: 2, H0098: 1 | 16 | |
| | | | | | | and H0510: 1. | | |
| HLDRQ82 | 837031 | 60 | 3-461 | 206 | Arg-13 to Glu-20, | L0581: 3 and H0510: | | |
| | | | | | Asn-26 to Asp-32, | 2. | | |
| | | | | | Thr-57 to Asn-82. | | | |
| HLDRR54 | 708594 | 61 | 1-180 | 207 | Thr-5 to Arg-11, | H0510: 2 | | |
| | | | | | Gln-21 to Ile-44. | | | |
| HLIBO03 | 923519 | 62 | 206-316 | 208 | | H0355: 2 | | |
| HLIBP66 | 750608 | 63 | 91-171 | 209 | | H0355: 2 | | |
| HLICR73 | 837030 | 64 | 1-444 | 210 | Asp-41 to Gly-47, | AR061: 9, AR089: 2 | | |
| | | | | | Pro-65 to Thr-72, | H0510: 3, L0393: 1, | | |
| | | | | | Thr-90 to Phe-95. | H0355: 1 and L0581: 1. | | |
| HLICT47 | 929754 | 65 | 116-355 | 211 | Thr-20 to Arg-26, | H0355: 2 | | |
| | | | | | Leu-30 to Ser-35. | | | |
| HLICT57 | 734451 | 66 | 1-186 | 212 | Ser-19 to Ala-25, | H0355: 2 | | |
| | | | | | Glu-31 to Thr-41, | | | |
| | | | | | Ser-49 to Arg-54. | | | |
| HLPBD66 | 928708 | 67 | 24-218 | 213 | His-1 to Arg-19. | H0349: 3 | | |
| HUTAF08 | 958353 | 68 | 197-391 | 214 | Thr-20 to Ala-28. | S0440: 1, L0779: 1 and | | |
| | | | | | | L0758: 1. | | |
| HLPBA84 | 912828 | 69 | 349-549 | 215 | | H0349: 1 and L0749: | | |
| | | | | | | 1. | | |
| HLICU57 | 871716 | 70 | 2-238 | 216 | Ser-1 to Lys-7, | H0355: 1 and L0749: | | |
| | | | | | Thr-19 to Glu-24. | 1. | | |
| HLICS57 | 734450 | 71 | 13-276 | 217 | Arg-14 to His-26, | H0355: 1 and L0731: | | |
| | | | | | Gly-63 to Arg-70. | 1. | | |
| HLICR28 | 686132 | 72 | 2-235 | 218 | Asn-7 to Ser-13, | H0355: 1 and L0749: | | |
| | | | | | Asn-25 to Lys-35, | 1. | | |
| | | | | | Thr-67 to Ser-72. | | | |
| HLICP76 | 825536 | 73 | 300-518 | 219 | | L0744: 3, H0355: 1 | | |
| | | | | | | and L0756: 1. | | |
| HLICO07 | 952625 | 74 | 344-493 | 220 | Gly-1 to Thr-7, | L0594: 2, H0355: 1, | | |
| | | | | | Gln-21 to Glu-29. | L0761: 1 and L0803: 1. | | |
| HLICL82 | 779576 | 75 | 3-203 | 221 | Asp-1 to Gly-6. | H0355: 1 and L0748: | | |
| | | | | | | 1. | | |
| HLICJ60 | 739746 | 76 | 170-349 | 222 | | L0749: 2, H0355: 1 | | |
| | | | | | | and L0748: 1. | | |
| HLIBZ10 | 963973 | 77 | 99-338 | 223 | Lys-30 to Val-35. | H0355: 1 and L0748: | | |
| | | | | | | 1. | | |
| HLIBK17 | 662438 | 78 | 249-416 | 224 | Ser-3 to Ser-19. | H0355: 1 and L0439: | | |
| | | | | | | 1. | | |
| HLIBB54 | 782180 | 79 | 3-260 | 225 | Pro-1 to Arg-9. | H0355: 1 and L0750: | | |
| | | | | | | 1. | | |
| HLDRT92 | 791215 | 80 | 209-412 | 226 | | L0748: 2 and H0510: | | |
| | | | | | | 1. | | |
| HLDRP58 | 735731 | 81 | 452-634 | 227 | Pro-16 to Asp-24. | H0510: 1 and L0753: | | |
| | | | | | | 1. | | |
| HLDQV07 | 952691 | 82 | 282-452 | 228 | | H0510: 1, L0438: 1 | | |
| | | | | | | and L0439: 1. | | |
| HLDQN90 | 857062 | 83 | 12-161 | 229 | Glu-24 to Arg-33, | H0510: 1 and L0759: | | |
| | | | | | Cys-37 to Val-42. | 1. | | |
| HLDQH68 | 835571 | 84 | 290-499 | 230 | Pro-17 to Arg-27, | H0510: 1 and L0589: | | |
| | | | | | Val-52 to Glu-61. | 1. | | |
| HLDQD92 | 552019 | 85 | 3-218 | 231 | | L0748: 2 and H0510: | | |
| | | | | | | 1. | | |
| HLDQC57 | 734475 | 86 | 33-230 | 232 | | L0758: 2 and H0510: | | |
| | | | | | | 1. | | |
| HLDPE31 | 697969 | 87 | 90-221 | 233 | Thr-25 to Thr-30, | L0748: 2, L0749: 2, | 3q27-q28 | 109565, |
| | | | | | Pro-32 to Phe-37. | H0510: 1 and L0809: 1. | | 109565, |
| | | | | | | | | 142640, |
| | | | | | | | | 165500, |
| | | | | | | | | 228960, |
| | | | | | | | | 261515, |
| | | | | | | | | 600044, |
| | | | | | | | | 600700 |
| HLDOX46 | 719023 | 88 | 73-249 | 234 | Asn-3 to Thr-8, | L0741: 2, H0510: 1 | | |
| | | | | | Gly-21 to Lys-35. | and L0592: 1. | | |
| HLDOT85 | 784331 | 89 | 244-480 | 235 | Arg-44 to Gly-50. | H0510: 1 and L0439: | | |
| | | | | | | 1. | | |
| HLDOS76 | 770016 | 90 | 320-439 | 236 | His-1 to Trp-7, | H0510: 1 and L0581: | | |
| | | | | | Gln-18 to Thr-25. | 1. | | |
| HLDOM43 | 715254 | 91 | 263-466 | 237 | | L0748: 2, H0510: 1 | | |
| | | | | | | and L0805: 1. | | |
| HLDOK25 | 678063 | 92 | 2-253 | 238 | | H0510: 1 and L0483: | | |
| | | | | | | 1. | | |
| HLDOE06 | 922162 | 93 | 153-1 | 239 | Gly-7 to His-17. | H0510: 1, L0372: 1 | | |
| | | | | | | and L0766: 1. | | |
| HLDOD83 | 724046 | 94 | 649-167 | 240 | | L0748: 2, H0510: 1 | | |
| | | | | | | and L0581: 1. | | |
| HLDOC67 | 689240 | 95 | 69-332 | 241 | Thr-32 to Trp-41, | H0510: 1 and L0600: | | |
| | | | | | Arg-55 to Tyr-61, | 1. | | |
| | | | | | Asp-83 to Gly-88. | | | |
| HLDNR75 | 767294 | 96 | 155-310 | 242 | Arg-12 to Met-20, | H0510: 1 and L0748: | | |
| | | | | | Gln-34 to Arg-52. | 1. | | |
| HLDNR54 | 729853 | 97 | 121-321 | 243 | Gln-62 to Lys-67. | H0510: 1 | | |
| HLDNL92 | 792694 | 98 | 48-218 | 244 | Phe-8 to Asp-14, | H0510: 1 and L0748: | | |
| | | | | | Pro-39 to Lys-57. | 1. | | |
| HLDNL57 | 963552 | 99 | 1-360 | 245 | Glu-1 to Ala-12, | L0731: 2 and H0510: | | |
| | | | | | Asp-75 to Trp-80. | 1. | | |
| HLDDY07 | 952751 | 100 | 187-357 | 246 | | H0509: 1 and L0748: | | |
| | | | | | | 1. | | |
| HLDDS06 | 934929 | 101 | 74-244 | 247 | Gln-6 to Trp-30, | H0509: 1 and L0794: | | |
| | | | | | Thr-41 to Asn-57. | 1. | | |
| HLDCW15 | 705466 | 102 | 222-413 | 248 | | L0748: 4 and H0509: | | |
| | | | | | | 1. | | |
| HLDCU74 | 765307 | 103 | 3-239 | 249 | Arg-5 to Phe-20, | H0509: 1 and L0743: | | |
| | | | | | Glu-27 to Leu-37, | 1. | | |
| | | | | | Glu-51 to Glu-58, | | | |
| | | | | | Lys-69 to Asp-79. | | | |
| HLDCE01 | 916444 | 104 | 156-308 | 250 | | H0509: 1 and L0779: | | |
| | | | | | | 1. | | |
| HLDBW64 | 746545 | 105 | 356-183 | 251 | Pro-23 to Thr-34. | H0509: 1 and L0748: | | |
| | | | | | | 1. | | |
| HLDBV65 | 764915 | 106 | 193-402 | 252 | | AR089: 23, AR061: 7 | 5 | |
| | | | | | | H0509: 1 | | |
| HLDBT71 | 760347 | 107 | 464-691 | 253 | Leu-22 to Asn-27. | L0748: 3, L0596: 2, | | |
| | | | | | | H0509: 1 and L0749: 1. | | |
| HLDBN55 | 731734 | 108 | 252-599 | 254 | Pro-4 to Ser-9, | H0509: 1 and L0596: | | |
| | | | | | Arg-11 to Phe-18, | 1. | | |
| | | | | | Val-22 to Phe-46. | | | |
| HLDBN38 | 678424 | 109 | 71-232 | 255 | Gly-5 to Pro-11, | H0509: 1, L0438: 1 | | |
| | | | | | Ala-17 to Gly-35, | and L0439: 1. | | |
| | | | | | Ile-39 to Arg-44. | | | |
| HLDBN03 | 924100 | 110 | 413-811 | 256 | Leu-11 to Glu-17. | L0439: 4, H0509: 1, | | |
| | | | | | | L0748: 1 and L0777: 1. | | |
| HLDBI09 | 625542 | 111 | 185-448 | 257 | Pro-26 to Ala-39. | H0509: 1 and L0749: | | |
| | | | | | | 1. | | |
| HLDBE09 | 625554 | 112 | 3-158 | 258 | Pro-6 to His-13. | H0509: 1 | | |
| HLDBD09 | 625551 | 113 | 85-423 | 259 | Ala-41 to Gly-63. | H0509: 1 | | |
| HLDBD02 | 920039 | 114 | 17-328 | 260 | His-1 to Arg-7, | H0509: 1 | | |
| | | | | | Val-14 to Gly-22, | | | |
| | | | | | Gln-29 to Arg-36, | | | |
| | | | | | Pro-58 to Gly-64, | | | |
| | | | | | Lys-84 to Ser-100. | | | |
| HLDBC10 | 964582 | 115 | 287-466 | 261 | Ala-1 to Tyr-6, | H0509: 1 | | |
| | | | | | Asp-13 to Ser-18, | | | |
| | | | | | Leu-21 to Val-27. | | | |
| HLDBB21 | 713680 | 116 | 2-376 | 262 | Ser-7 to Asp-15, | AR089: 27, AR061: 19 | 16p11.2 | 147781, |
| | | | | | Leu-24 to Leu-29, | H0509: 1 | | 172471, |
| | | | | | Thr-116 to Ile-122. | | | 182381 |
| HLDBB08 | 959385 | 117 | 1-117 | 263 | Ala-1 to Cys-8. | H0509: 1 | | |
| HLDAV58 | 736027 | 118 | 203-361 | 264 | | L0756: 3 and H0509: | | |
| | | | | | | 1. | | |
| HLDAV38 | 709140 | 119 | 147-344 | 265 | Val-1 to Tyr-6. | H0509: 1 | | |
| HLDAV13 | 657191 | 120 | 224-439 | 266 | Ala-1 to Asp-8, | H0509: 1 | | |
| | | | | | Thr-27 to Arg-33. | | | |
| HLDAV01 | 916462 | 121 | 3-185 | 267 | Met-35 to Gln-41. | H0509: 1 | | |
| HLDAR12 | 970634 | 122 | 163-324 | 268 | Gln-47 to Cys-53. | H0509: 1 and L0439: | | |
| | | | | | | 1. | | |
| HLDAK33 | 857107 | 123 | 2-286 | 269 | | L0617: 1 and H0509: | 2q11.23 | 123620, |
| | | | | | | 1. | | 600850 |
| HLDAJ38 | 709138 | 124 | 360-476 | 270 | | H0509: 1 and L0748: | | |
| | | | | | | 1. | | |
| HLDAA31 | 586638 | 125 | 2-235 | 271 | | H0509: 1 | | |
| HHNAC01 | 913646 | 126 | 513-722 | 272 | | T0090: 1 and L0589: 1. | | |
| HHNAB42 | 714097 | 127 | 60-155 | 273 | Thr-1 to Trp-8, | T0090: 1 and L0745: 1. | | |
| | | | | | Pro-15 to Ser-20. | | | |
| HHLAB49 | 723222 | 128 | 288-494 | 274 | Ser-35 to Pro-41, | T0091: 1 and L0748: 1. | | |
| | | | | | Pro-63 to Ser-69. | | | |
| HFVKC87 | 886358 | 129 | 544-771 | 275 | | AR051: 34, AR050: | | |
| | | | | | | 27, AR054: 24 | | |
| | | | | | | H0393: 1 | | |
| HFVJW07 | 951883 | 130 | 295-516 | 276 | His-12 to Pro-25, | L0777: 3 and H0393: | | |
| | | | | | Ser-45 to Gly-51, | 1. | | |
| | | | | | Asp-58 to Trp-67. | | | |
| HFVIP01 | 914567 | 131 | 8-307 | 277 | Gly-1 to Glu-16, | H0393: 1 and L0768: | | |
| | | | | | Pro-36 to Lys-45, | 1. | | |
| | | | | | Thr-50 to Pro-56. | | | |
| HFVID84 | 783129 | 132 | 193-453 | 278 | Gly-22 to Gly-30, | H0393: 1 and L0439: | | |
| | | | | | Tyr-53 to Pro-59, | 1. | | |
| | | | | | Ile-65 to Gly-70. | | | |
| HFVID08 | 959739 | 133 | 142-516 | 279 | Pro-7 to Gln-20, | L0794: 2 and H0393: | | |
| | | | | | Pro-25 to Pro-30, | 1. | | |
| | | | | | Gly-97 to Asp-106, | | | |
| | | | | | Pro-109 to Arg-125. | | | |
| HFVIC84 | 783131 | 134 | 440-147 | 280 | Lys-5 to Ile-16. | L0439: 2, L0749: 2, | | |
| | | | | | | H0393: 1, L0744: 1 and | | |
| | | | | | | L0750: 1. | | |
| HFVIC30 | 881306 | 135 | 3-452 | 281 | Tyr-15 to Leu-20. | H0393: 1 and L0581: | | |
| | | | | | | 1. | | |
| HFVHX74 | 854533 | 136 | 173-409 | 282 | Pro-1 to Val-6, | H0393: 1 and L0591: | | |
| | | | | | Pro-24 to Asn-32, | 1. | | |
| | | | | | Ser-49 to Gln-54. | | | |
| HFVHU23 | 676060 | 137 | 375-512 | 283 | Glu-18 to Ser-24. | H0393: 1,L0779: 1 | | |
| | | | | | | and L0777: 1. | | |
| HFVHR05 | 932181 | 138 | 188-358 | 284 | Thr-1 to Arg-6. | H0393: 1, L0742: 1 | | |
| | | | | | | and L0748: 1. | | |
| HFVHQ93 | 792444 | 139 | 95-268 | 285 | | H0393: 1, L0748: 1 | | |
| | | | | | | and L0596: 1. | | |
| HFVGY60 | 710929 | 140 | 15-164 | 286 | | H0393: 1 | | |
| | 854540 | 156 | 115-276 | 302 | Pro-42 to Ala-50. | | | |
| HFVGM12 | 971182 | 141 | 221-328 | 287 | | H0393: 1 and L0747: | | |
| | | | | | | 1. | | |
| HFVBA27 | 414543 | 142 | 349-567 | 288 | | L0748: 6, H0152: 1, | 3p21-p14 | 139330, |
| | | | | | | L0749: 1, L0779: 1 and | | 139360, |
| | | | | | | L0755: 1. | | 150250, |
| | | | | | | | | 156845, |
| | | | | | | | | 156845, |
| | | | | | | | | 156845, |
| | | | | | | | | 164500, |
| | | | | | | | | 182280, |
| | | | | | | | | 600163, |
| | | | | | | | | 600971, |
| | | | | | | | | 601226, |
| | | | | | | | | 601267, |
| | | | | | | | | 601373 |
| HFLVG70 | 757521 | 143 | 36-455 | 289 | | H0246: 1 and L0749: | | |
| | | | | | | 1. | | |
| HFLUE23 | 676425 | 144 | 90-248 | 290 | Ser-15 to Gln-22. | H0199: 1 and L0748: | | |
| | | | | | | 1. | | |
| HFLUE22 | 522779 | 145 | 105-221 | 291 | Lys-7 to Phe-13. | H0199: 1 | | |
| HFLUD68 | 753847 | 146 | 102-305 | 292 | | H0199: 1 and L0749: | | |
| | | | | | | 1. | | |
| HFLQJ68 | 753216 | 147 | 3-287 | 293 | Lys-7 to Leu-18. | H0357: 1 and L0745: | | |
| | | | | | | 1. | | |
| HFLQJ38 | 709034 | 148 | 94-357 | 294 | Asp-17 to Asn-28, | L0748: 2 and H0357: | | |
| | | | | | Gln-83 to Gln-88. | 1. | | |
| HALTA38 | 705895 | 149 | 250-444 | 295 | Asn-1 to Glu-6. | L0361: 2, H0147: 1 | | |
| | | | | | | and L0731: 1. | | |
| HALSD90 | 500844 | 150 | 70-171 | 296 | | H0098: 1 | | |
| HALSD51 | 500852 | 151 | 186-329 | 297 | | H0098: 1 | | |
| HALSD34 | 509765 | 152 | 42-188 | 298 | | H0098: 1 | | |
| HALSD03 | 960910 | 153 | 2-178 | 299 | | H0098: 1 | | |
| HALSC37 | 705894 | 154 | 1-195 | 300 | | H0098: 1 | | |
| HALSC18 | 667044 | 155 | 62-277 | 301 | Ala-13 to Arg-25, | H0098: 1 | | |
| | | | | | Asn-33 to Lys-41. | | | |

[0038] The first column in Table 1A provides a unique “Clone ID NO:Z” for a cDNA clone related to each contig sequence disclosed in Table 1A. This clone ID references the cDNA clone which contains at least the 5′ most sequence of the assembled contig, and at least a portion of SEQ ID NO:X was determined by directly sequencing the referenced clone. The reference clone may have more sequence than described in the sequence listing or the clone may have less. In the vast majority of cases, however, the clone is believed to encode a full-length polypeptide. In the case where a clone is not full-length, a full-length cDNA can be obtained by methods known in the art and/or as described elsewhere herein.

[0039] The second column in Table 1A provides a unique “Contig ID” identification for each contig sequence. The third column provides the “SEQ ID NO:X” identifier for each of the liver associated contig polynucleotide sequences disclosed in Table 1A. The fourth column, “ORF (From-To)”, provides the location (i.e., nucleotide position numbers) within the polynucleotide sequence “SEQ ID NO:X” that delineate the preferred open reading frame (ORF) shown in the sequence listing and referenced in Table 1A, column 5, as SEQ ID NO:Y. Where the nucleotide position number “To” is lower than the nucleotide position number “From”, the preferred ORF is the reverse complement of the referenced polynucleotide sequence.

[0040] The fifth column in Table 1A provides the corresponding SEQ ID NO:Y for the polypeptide sequence encoded by the preferred ORF delineated in column 4. In one embodiment, the invention provides an amino acid sequence comprising, or alternatively consisting of, a polypeptide encoded by the portion of SEQ ID NO:X delineated by “ORF (From-To)”. Also provided are polynucleotides encoding such amino acid sequences and the complementary strand thereto.

[0041] Column 6 in Table 1A lists residues comprising epitopes contained in the polypeptides encoded by the preferred ORF (SEQ ID NO:Y), as predicted using the algorithm of Jameson and Wolf, (1988) Comp. Appl. Biosci. 4:181-186. The Jameson-Wolf antigenic analysis was performed using the computer program PROTEAN (Version 3.11 for the Power MacIntosh, DNASTAR, Inc., 1228 South Park Street Madison, Wis.). In specific embodiments, polypeptides of the invention comprise, or alternatively consist of, at least one, two, three, four, five or more of the predicted epitopes as described in Table 1A. It will be appreciated that depending on the analytical criteria used to predict antigenic determinants, the exact address of the determinant may vary slightly.

[0042] Column 7 in Table 1A provides an expression profile and library code: count for each of the contig sequences (SEQ ID NO:X) disclosed in Table 1A, which can routinely be combined with the information provided in Table 4 and used to determine the normal or diseased tissues, cells, and/or cell line libraries which predominantly express the polynucleotides of the invention. The first number in column 7 (preceding the colon), represents the tissue/cell source identifier code corresponding to the code and description provided in Table 4. For those identifier codes in which the first two letters are not “AR”, the second number in column 7 (following the colon) represents the number of times a sequence corresponding to the reference polynucleotide sequence was identified in the tissue/cell source. Those tissue/cell source identifier codes in which the first two letters are “AR” designate information generated using DNA array technology. Utilizing this technology, cDNAs were amplified by PCR and then transferred, in duplicate, onto the array. Gene expression was assayed through hybridization of first strand cDNA probes to the DNA array. cDNA probes were generated from total RNA extracted from a variety of different tissues and cell lines. Probe synthesis was performed in the presence of ³³P dCTP, using oligo(dT) to prime reverse transcription. After hybridization, high stringency washing conditions were employed to remove non-specific hybrids from the array. The remaining signal, emanating from each gene target, was measured using a Phosphorimager. Gene expression was reported as Phosphor Stimulating Luminescence (PSL) which reflects the level of phosphor signal generated from the probe hybridized to each of the gene targets represented on the array. A local background signal subtraction was performed before the total signal generated from each array was used to normalize gene expression between the different hybridizations. The value presented after “[array code]:” represents the mean of the duplicate values, following background subtraction and probe normalization. One of skill in the art could routinely use this information to identify normal and/or diseased tissue(s) which show a predominant expression pattern of the corresponding polynucleotide of the invention or to identify polynucleotides which show predominant and/or specific tissue and/or cell expression. The sequences disclosed herein have been determined to be predominantly expressed in liver tissues, including normal and diseased liver tissues (See Table 1A, column 7 and Table 4).

[0043] Column 8 in Table 1A provides a chromosomal map location for certain polynucleotides of the invention. Chromosomal location was determined by finding exact matches to EST and cDNA sequences contained in the NCBI (National Center for Biotechnology Information) UniGene database. Each sequence in the UniGene database is assigned to a “cluster”; all of the ESTs, cDNAs, and STSs in a cluster are believed to be derived from a single gene. Chromosomal mapping data is often available for one or more sequence(s) in a UniGene cluster; this data (if consistent) is then applied to the cluster as a whole. Thus, it is possible to infer the chromosomal location of a new polynucleotide sequence by determining its identity with a mapped UniGene cluster.

[0044] A modified version of the computer program BLASTN (Altshul et al., J. Mol. Biol. 215:403-410 (1990), and Gish et al., Nat. Genet. 3:266-272 (1993)) was used to search the UniGene database for EST or cDNA sequences that contain exact or near-exact matches to a polynucleotide sequence of the invention (the ‘Query’). A sequence from the UniGene database (the ‘Subject’) was said to be an exact match if it contained a segment of 50 nucleotides in length such that 48 of those nucleotides were in the same order as found in the Query sequence. If all of the matches that met this criteria were in the same UniGene cluster, and mapping data was available for this cluster, it is indicated in Table 1A under the heading “Cytologic Band”. Where a cluster had been further localized to a distinct cytologic band, that band is disclosed; where no banding information was available, but the gene had been localized to a single chromosome, the chromosome is disclosed.

[0045] Once a presumptive chromosomal location was determined for a polynucleotide of the invention, an associated disease locus was identified by comparison with a database of diseases which have been experimentally associated with genetic loci. The database used was the Morbid Map, derived from OMIM™ (supra). If the putative chromosomal location of a polynucleotide of the invention (Query sequence) was associated with a disease in the Morbid Map database, an OMIM reference identification number was noted in column 9, Table 1A, labeled “OMIM Disease Reference(s)”. Table 5 is a key to the OMIM reference identification numbers (column 1), and provides a description of the associated disease in Column 2.

TABLE 1B

| Clone ID | SEQ ID | CONTIG | BAC ID: | SEQ ID | EXON |
|---|---|---|---|---|---|
| NO: Z | NO: X | ID: | A | NO: B | From-To |
| HALSC22 | 11 | 503082 | AC013783 | 303 | 1-325 |
| HALSC22 | 11 | 503082 | AC013783 | 304 | 1-319 |
| HALSC22 | 11 | 503082 | AL354797 | 305 | 1-325 |
| HALSC22 | 11 | 503082 | AC068485 | 306 | 1-188 |
| | | | | | 1825-2174 |
| | | | | | 3023-3181 |
| | | | | | 4591-4915 |
| HALSC22 | 11 | 503082 | AC013740 | 307 | 1-325 |
| HALSC22 | 11 | 503082 | AL354797 | 308 | 1-159 |
| HALSC22 | 11 | 503082 | AC068485 | 309 | 1-491 |
| HALSC22 | 11 | 503082 | AL354797 | 310 | 1-490 |
| HALSC22 | 11 | 503082 | AC068485 | 311 | 1-230 |
| | | | | | 285-410 |
| HALSC22 | 11 | 503082 | AC013740 | 312 | 1-490 |
| HALSG01 | 13 | 500834 | AC025008 | 313 | 1-68 |
| | | | | | 166-273 |
| | | | | | 1178-1509 |
| | | | | | 1893-2197 |
| | | | | | 3086-3625 |
| | | | | | 4073-4342 |
| | | | | | 4657-4797 |
| | | | | | 5553-5905 |
| | | | | | 6891-6945 |
| HALSG01 | 13 | 500834 | AC027052 | 314 | 1-68 |
| | | | | | 166-273 |
| | | | | | 1178-1509 |
| | | | | | 1893-2197 |
| | | | | | 3086-3625 |
| | | | | | 4106-4342 |
| | | | | | 4657-4797 |
| | | | | | 5553-5905 |
| | | | | | 6891-6945 |
| HALSG01 | 13 | 500834 | AL365187 | 315 | 1-105 |
| | | | | | 586-822 |
| | | | | | 1137-1277 |
| | | | | | 2033-2385 |
| | | | | | 3371-3425 |
| HALSG01 | 13 | 500834 | AC025008 | 316 | 1-335 |
| HALSG01 | 13 | 500834 | AC027052 | 317 | 1-335 |
| HALSG01 | 13 | 500834 | AL365187 | 318 | 1-417 |
| HALSJ15 | 15 | 501008 | AF127936 | 319 | 1-496 |
| HALSJ15 | 15 | 501008 | AF127936 | 320 | 1-182 |
| HALSJ15 | 15 | 501008 | AF127936 | 321 | 1-337 |
| HALSL45 | 16 | 723542 | AC025712 | 322 | 1-1822 |
| | | | | | 1892-2371 |
| HALSN27 | 17 | 509759 | AL357077 | 323 | 1-151 |
| | | | | | 2431-2753 |
| HALSN27 | 17 | 509759 | AL358777 | 324 | 1-151 |
| | | | | | 2431-2753 |
| HFLQF55 | 21 | 719018 | AC026070 | 325 | 1-987 |
| HFLQF55 | 21 | 719018 | AL360008 | 326 | 1-988 |
| | | | | | 1239-1545 |
| HFLQF55 | 21 | 719018 | AL360008 | 327 | 1-183 |
| HFLSF55 | 22 | 955305 | AF181895 | 328 | 1-463 |
| HFLSF55 | 22 | 955305 | AF128834 | 329 | 1-463 |
| HFLSF55 | 22 | 955305 | AF181895 | 330 | 1-371 |
| HFLSF55 | 22 | 955305 | AF128834 | 331 | 1-371 |
| HFLSI23 | 24 | 509743 | AC022022 | 332 | 1-1062 |
| HFLSI23 | 24 | 509743 | AC016197 | 333 | 1-1062 |
| HFLSI23 | 24 | 509743 | AC022022 | 334 | 1-599 |
| HFLSI23 | 24 | 509743 | AC022022 | 335 | 1-115 |
| HFLSI23 | 24 | 509743 | AC016197 | 336 | 1-599 |
| HFLSI23 | 24 | 509743 | AC016197 | 337 | 1-115 |
| HFLSJ61 | 25 | 507017 | AC023047 | 338 | 1-55 |
| | | | | | 938-1456 |
| | | | | | 2590-3181 |
| | | | | | 3342-3652 |
| | | | | | 5147-5459 |
| | | | | | 5516-5820 |
| | | | | | 6548-6782 |
| | | | | | 6982-7244 |
| | | | | | 9489-9609 |
| | | | | | 11828-12359 |
| | | | | | 13568-13934 |
| | | | | | 14831-15137 |
| | | | | | 15440-15911 |
| | | | | | 18095-18410 |
| | | | | | 20488-20746 |
| | | | | | 20763-20968 |
| | | | | | 21568-21678 |
| | | | | | 23833-24142 |
| | | | | | 25794-25921 |
| | | | | | 25944-26067 |
| | | | | | 27153-27464 |
| | | | | | 27677-27977 |
| | | | | | 31312-31412 |
| | | | | | 32736-33009 |
| | | | | | 34554-34899 |
| | | | | | 36897-37644 |
| HFLSJ61 | 25 | 507017 | AC023047 | 339 | 1-262 |
| HFLSK11 | 26 | 964908 | AC016026 | 340 | 1-1671 |
| HFLSK11 | 26 | 964908 | AC007845 | 341 | 1-1671 |
| HFLSK11 | 26 | 964908 | AC016025 | 342 | 1-1671 |
| HFLSK11 | 26 | 964908 | AC016026 | 343 | 1-492 |
| HFLSK11 | 26 | 964908 | AC016026 | 344 | 1-287 |
| HFLSK11 | 26 | 964908 | AC007845 | 345 | 1-492 |
| HFLSK11 | 26 | 964908 | AC007845 | 346 | 1-287 |
| HFLSK11 | 26 | 964908 | AC016025 | 347 | 1-492 |
| HFLSK11 | 26 | 964908 | AC016025 | 348 | 1-287 |
| HFLSK31 | 27 | 535238 | AC009397 | 349 | 1-418 |
| HFLSK31 | 27 | 535238 | AC008770 | 350 | 1-489 |
| HFLSK31 | 27 | 535238 | AC009397 | 351 | 1-306 |
| HFLSK31 | 27 | 535238 | AC008770 | 352 | 1-306 |
| HFLSK31 | 27 | 535238 | AC009397 | 353 | 1-315 |
| HFLSK31 | 27 | 535238 | AC008770 | 354 | 1-315 |
| HFLSK81 | 28 | 761133 | AL031584 | 355 | 1-141 |
| | | | | | 2019-2108 |
| | | | | | 2220-2434 |
| | | | | | 2527-2834 |
| | | | | | 2922-4978 |
| HFLSK81 | 28 | 761133 | AL031584 | 356 | 1-461 |
| HFLUF43 | 29 | 928026 | AL365495 | 357 | 1-1200 |
| HFLUF43 | 29 | 928026 | AC074244 | 358 | 1-1034 |
| HFLUF43 | 29 | 928026 | AL365495 | 359 | 1-295 |
| HFLUF43 | 29 | 928026 | AC074244 | 360 | 1-295 |
| HFLUG50 | 31 | 526181 | AC026874 | 361 | 1-341 |
| HFLUG50 | 31 | 526181 | AC026874 | 362 | 1-351 |
| HFLVE85 | 32 | 531014 | AL356112 | 363 | 1-931 |
| | | | | | 968-1322 |
| | | | | | 1862-2304 |
| HFLVE85 | 32 | 531014 | AL356112 | 364 | 1-330 |
| HFLVI15 | 33 | 921860 | AC010357 | 365 | 1-276 |
| HFVHC25 | 38 | 678573 | AC032025 | 366 | 1-220 |
| HFVHC25 | 38 | 678573 | AC032025 | 367 | 1-507 |
| HFVHE66 | 40 | 572852 | AC024898 | 368 | 1-309 |
| HFVHE66 | 40 | 572852 | AC013639 | 369 | 1-309 |
| HFVHE66 | 40 | 572852 | AC024168 | 370 | 1-309 |
| HHLBA18 | 45 | 527530 | AC019310 | 371 | 1-302 |
| HHLBA18 | 45 | 527530 | AC019310 | 372 | 1-169 |
| HLDAK38 | 46 | 689904 | AC019146 | 373 | 1-456 |
| HLDAK38 | 46 | 689904 | AC019146 | 374 | 1-366 |
| HLDAK38 | 46 | 689904 | AC019146 | 375 | 1-410 |
| HLDBJ86 | 47 | 882365 | AC026532 | 376 | 1-426 |
| | | | | | 767-796 |
| HLDBJ86 | 47 | 882365 | AC026532 | 377 | 1-864 |
| HLDOB53 | 50 | 728220 | AC005320 | 378 | 1-329 |
| HLDOB53 | 50 | 728220 | AC005320 | 379 | 1-289 |
| HLDOR73 | 51 | 683262 | AC025902 | 380 | 1-356 |
| HLDOR73 | 51 | 683262 | AP002027 | 381 | 1-356 |
| HLDOR73 | 51 | 683262 | AC025902 | 382 | 1-199 |
| | | | | | 285-484 |
| HLDOR73 | 51 | 683262 | AC025902 | 383 | 1-301 |
| HLDOR73 | 51 | 683262 | AP002027 | 384 | 1-301 |
| | | | | | 342-861 |
| | | | | | 1265-1482 |
| HLDOR73 | 51 | 683262 | AP002027 | 385 | 1-397 |
| HLDOZ69 | 52 | 697988 | U73330 | 386 | 1-641 |
| HLDOZ69 | 52 | 697988 | AL137143 | 387 | 1-641 |
| HLDQB65 | 54 | 708002 | AC016439 | 388 | 1-460 |
| HLDQB65 | 54 | 708002 | AC016439 | 389 | 1-593 |
| HLDQB65 | 54 | 708002 | AC016439 | 390 | 1-567 |
| | | | | | 638-1226 |
| HLDRD54 | 57 | 727954 | AC008807 | 391 | 1-1113 |
| HLDRD54 | 57 | 727954 | AC026439 | 392 | 1-1113 |
| HLDRD54 | 57 | 727954 | AC008807 | 393 | 1-849 |
| HLDRD54 | 57 | 727954 | AC008807 | 394 | 1-128 |
| HLDRD54 | 57 | 727954 | AC026439 | 395 | 1-115 |
| HLDRD54 | 57 | 727954 | AC026439 | 396 | 1-847 |
| HLDRI94 | 59 | 784582 | AL158839 | 397 | 1-102 |
| | | | | | 737-824 |
| | | | | | 1694-1817 |
| | | | | | 2984-3042 |
| | | | | | 6539-6691 |
| | | | | | 6970-7470 |
| HLDRI94 | 59 | 784582 | AC026545 | 398 | 1-102 |
| | | | | | 737-824 |
| | | | | | 1694-1817 |
| | | | | | 2984-3042 |
| | | | | | 6539-6691 |
| | | | | | 6970-7470 |
| HLDRI94 | 59 | 784582 | AL354872 | 399 | 1-573 |
| | | | | | 4944-5028 |
| | | | | | 6926-7019 |
| | | | | | 7909-8588 |
| | | | | | 10553-10662 |
| | | | | | 13272-13405 |
| | | | | | 13740-13927 |
| | | | | | 16881-16983 |
| | | | | | 18783-18839 |
| | | | | | 19305-19383 |
| | | | | | 19538-19655 |
| | | | | | 21072-21229 |
| | | | | | 21861-21948 |
| | | | | | 22818-22941 |
| | | | | | 24108-24166 |
| | | | | | 27663-27815 |
| | | | | | 28088-28588 |
| HLDRI94 | 59 | 784582 | AL158839 | 400 | 1-185 |
| HLDRI94 | 59 | 784582 | AC026545 | 401 | 1-185 |
| HLDRI94 | 59 | 784582 | AL354872 | 402 | 1-186 |
| HLDRQ82 | 60 | 837031 | AC012313 | 403 | 1-726 |
| | | | | | 806-894 |
| | | | | | 917-1338 |
| | | | | | 1536-1743 |
| | | | | | 2014-2111 |
| | | | | | 2295-2451 |
| | | | | | 2541-2902 |
| HLDRQ82 | 60 | 837031 | AC012313 | 404 | 1-156 |
| HLDRQ82 | 60 | 837031 | AC012313 | 405 | 1-513 |
| HLDRR54 | 61 | 708594 | AC009128 | 406 | 1-709 |
| HLDRR54 | 61 | 708594 | AC009128 | 407 | 1-187 |
| HLIBO03 | 62 | 923519 | AL139113 | 408 | 1-291 |
| HLIBO03 | 62 | 923519 | AL139113 | 409 | 1-447 |
| HLIBO03 | 62 | 923519 | AL139113 | 410 | 1-106 |
| HLIBP66 | 63 | 750608 | AL157828 | 411 | 1-227 |
| HLPBA84 | 69 | 912828 | AL354707 | 412 | 1-446 |
| | | | | | 1967-2228 |
| | | | | | 2977-3459 |
| HLPBA84 | 69 | 912828 | AL354707 | 413 | 1-169 |
| | | | | | 259-566 |
| HLPBA84 | 69 | 912828 | AL354707 | 414 | 1-492 |
| HLICS57 | 71 | 734450 | AC008481 | 415 | 1-227 |
| | | | | | 2005-2722 |
| | | | | | 3304-3403 |
| | | | | | 3939-4507 |
| | | | | | 4653-4882 |
| | | | | | 5230-5288 |
| | | | | | 5429-5833 |
| | | | | | 6850-7703 |
| HLICS57 | 71 | 734450 | AC008481 | 416 | 1-464 |
| HLICJ60 | 76 | 739746 | AC018630 | 417 | 1-961 |
| HLICJ60 | 76 | 739746 | AC018630 | 418 | 1-394 |
| HLICJ60 | 76 | 739746 | AC018630 | 419 | 1-1240 |
| HLIBZ10 | 77 | 963973 | AC027030 | 420 | 1-340 |
| HLIBZ10 | 77 | 963973 | AC027030 | 421 | 1-448 |
| HLIBZ10 | 77 | 963973 | AC027030 | 422 | 1-772 |
| HLIBK17 | 78 | 662438 | AL158842 | 423 | 1-453 |
| HLIBK17 | 78 | 662438 | AL158842 | 424 | 1-1229 |
| HLIBB54 | 79 | 782180 | AC009027 | 425 | 1-45 |
| | | | | | 305-694 |
| | | | | | 830-3497 |
| HLIBB54 | 79 | 782180 | AC009131 | 426 | 1-45 |
| | | | | | 305-694 |
| | | | | | 830-3500 |
| HLIBB54 | 79 | 782180 | AC009027 | 427 | 1-298 |
| HLIBB54 | 79 | 782180 | AC009027 | 428 | 1-2124 |
| HLIBB54 | 79 | 782180 | AC009131 | 429 | 1-298 |
| HLIBB54 | 79 | 782180 | AC009131 | 430 | 1-2124 |
| HLDRT92 | 80 | 791215 | AC012344 | 431 | 1-429 |
| | | | | | 821-1364 |
| | | | | | 2149-2201 |
| | | | | | 2203-2598 |
| HLDRT92 | 80 | 791215 | AC009560 | 432 | 1-429 |
| | | | | | 821-1364 |
| | | | | | 2151-2203 |
| | | | | | 2205-2600 |
| HLDRT92 | 80 | 791215 | AC012344 | 433 | 1-532 |
| HLDRT92 | 80 | 791215 | AC009560 | 434 | 1-532 |
| HLDRP58 | 81 | 735731 | AC012474 | 435 | 1-658 |
| HLDRP58 | 81 | 735731 | AC009754 | 436 | 1-168 |
| | | | | | 975-1633 |
| | | | | | 2930-3956 |
| | | | | | 4337-6149 |
| HLDRP58 | 81 | 735731 | AC025917 | 437 | 1-168 |
| | | | | | 975-1633 |
| | | | | | 2930-3956 |
| | | | | | 4337-6149 |
| HLDRP58 | 81 | 735731 | AC025917 | 438 | 1-285 |
| HLDRP58 | 81 | 735731 | AC009754 | 439 | 1-285 |
| HLDQV07 | 82 | 952691 | AL157760 | 440 | 1-435 |
| HLDQV07 | 82 | 952691 | AL390029 | 441 | 1-435 |
| | | | | | 1195-1516 |
| HLDQN90 | 83 | 857062 | AL022323 | 442 | 1-52 |
| | | | | | 82-410 |
| | | | | | 1293-1768 |
| | | | | | 5245-5372 |
| | | | | | 6283-6796 |
| | | | | | 8571-8685 |
| | | | | | 9817-10252 |
| HLDQH68 | 84 | 835571 | AC002352 | 443 | 1-379 |
| | | | | | 858-1086 |
| | | | | | 1843-2418 |
| HLDPE31 | 87 | 697969 | AC034190 | 444 | 1-377 |
| | | | | | 690-1196 |
| HLDPE31 | 87 | 697969 | AC069069 | 445 | 1-376 |
| | | | | | 689-1194 |
| HLDPE31 | 87 | 697969 | AC007920 | 446 | 1-376 |
| | | | | | 689-1194 |
| HLDPE31 | 87 | 697969 | AC034190 | 447 | 1-401 |
| HLDPE31 | 87 | 697969 | AC069069 | 448 | 1-401 |
| HLDPE31 | 87 | 697969 | AC069069 | 449 | 1-394 |
| HLDPE31 | 87 | 697969 | AC007920 | 450 | 1-394 |
| HLDPE31 | 87 | 697969 | AC007920 | 451 | 1-401 |
| HLDOX46 | 88 | 719023 | AF038458 | 452 | 1-630 |
| | | | | | 1311-1416 |
| | | | | | 2481-4022 |
| | | | | | 4952-5252 |
| | | | | | 6370-6479 |
| | | | | | 7623-8269 |
| HLDOS76 | 90 | 770016 | AL121926 | 453 | 1-203 |
| | | | | | 1830-1953 |
| | | | | | 2743-2933 |
| | | | | | 3071-3533 |
| | | | | | 4061-4265 |
| | | | | | 5066-5270 |
| | | | | | 5371-6058 |
| | | | | | 6482-6626 |
| | | | | | 6816-6942 |
| | | | | | 7029-7116 |
| | | | | | 7408-7737 |
| HLDOS76 | 90 | 770016 | AL121926 | 454 | 1-101 |
| HLDOS76 | 90 | 770016 | AL121926 | 455 | 1-463 |
| HLDOC67 | 95 | 689240 | AC008481 | 456 | 1-227 |
| | | | | | 2005-2722 |
| | | | | | 3304-3403 |
| | | | | | 3939-4507 |
| | | | | | 4653-4882 |
| | | | | | 5230-5288 |
| | | | | | 5429-5833 |
| | | | | | 6850-7703 |
| HLDOC67 | 95 | 689240 | AC008481 | 457 | 1-464 |
| HLDNR75 | 96 | 767294 | AP001124 | 458 | 1-223 |
| | | | | | 996-1562 |
| | | | | | 1770-2368 |
| | | | | | 2387-2959 |
| | | | | | 3015-3123 |
| | | | | | 3499-6406 |
| | | | | | 7093-7404 |
| | | | | | 7526-8527 |
| | | | | | 8585-10046 |
| HLDNR75 | 96 | 767294 | AC010929 | 459 | 1-1002 |
| HLDNR75 | 96 | 767294 | AC010929 | 460 | 1-1463 |
| HLDNR75 | 96 | 767294 | AC010929 | 461 | 1-313 |
| HLDNRS4 | 97 | 729853 | AC002401 | 462 | 1-547 |
| HLDNRS4 | 97 | 729853 | AC002401 | 463 | 1-440 |
| HLDNR54 | 97 | 729853 | AC002401 | 464 | 1-145 |
| | | | | | 1780-2184 |
| HLDDY07 | 100 | 952751 | AL157773 | 465 | 1-139 |
| | | | | | 147-2377 |
| | | | | | 3435-4231 |
| | | | | | 4332-4673 |
| | | | | | 4817-5164 |
| | | | | | 5635-5749 |
| | | | | | 6686-7213 |
| | | | | | 7319-7546 |
| | | | | | 7910-8192 |
| | | | | | 8448-8545 |
| | | | | | 8848-9085 |
| | | | | | 11018-11079 |
| HLDDY07 | 100 | 952751 | AC019053 | 466 | 1-139 |
| | | | | | 147-2376 |
| | | | | | 3436-4232 |
| | | | | | 4333-4674 |
| | | | | | 4818-5165 |
| | | | | | 5630-5744 |
| | | | | | 6681-7208 |
| | | | | | 7314-7541 |
| | | | | | 7905-8187 |
| | | | | | 8143-8540 |
| | | | | | 8843-9080 |
| | | | | | 11014-11075 |
| | | | | | 12965-13243 |
| | | | | | 13831-13911 |
| | | | | | 13990-14093 |
| | | | | | 14175-14299 |
| HLDDY07 | 100 | 952751 | AL033397 | 467 | 1-139 |
| | | | | | 147-2376 |
| | | | | | 3436-4232 |
| | | | | | 4333-4674 |
| | | | | | 4818-5165 |
| | | | | | 5630-5744 |
| | | | | | 6681-7208 |
| | | | | | 7314-7541 |
| | | | | | 7905-8187 |
| | | | | | 8143-8540 |
| | | | | | 8843-9080 |
| | | | | | 11013-11074 |
| | | | | | 12964-13242 |
| | | | | | 13826-13910 |
| | | | | | 13989-14092 |
| | | | | | 14174-14298 |
| | | | | | 15000-17000 |
| HLDDY07 | 100 | 952751 | AC019053 | 468 | 1-197 |
| HLDDY07 | 100 | 952751 | AL157773 | 469 | 1-78 |
| | | | | | 511-796 |
| | | | | | 1531-1713 |
| | | | | | 3959-4059 |
| | | | | | 4550-5232 |
| | | | | | 6260-6670 |
| | | | | | 7986-8045 |
| HLDDY07 | 100 | 952751 | AL033397 | 470 | 1-78 |
| | | | | | 511-775 |
| | | | | | 1531-1713 |
| | | | | | 3961-4061 |
| | | | | | 4552-5688 |
| | | | | | 6269-6679 |
| | | | | | 7996-8054 |
| HLDCW15 | 102 | 705466 | AC026108 | 471 | 1-942 |
| | | | | | 950-1026 |
| | | | | | 1069-2658 |
| | | | | | 2713-2878 |
| | | | | | 3584-3657 |
| | | | | | 7735-8172 |
| | | | | | 8227-8381 |
| | | | | | 8388-8445 |
| | | | | | 9541-10017 |
| | | | | | 10072-10182 |
| | | | | | 10911-10983 |
| | | | | | 11557-11697 |
| | | | | | 13705-15195 |
| | | | | | 16125-17257 |
| | | | | | 17310-17865 |
| HLDCW15 | 102 | 705466 | AC069227 | 472 | 1-438 |
| | | | | | 493-647 |
| | | | | | 1807-2283 |
| | | | | | 2338-2448 |
| | | | | | 3823-3963 |
| | | | | | 5971-7460 |
| | | | | | 8390-9289 |
| HLDCW15 | 102 | 705466 | AC073157 | 473 | 1-148 |
| | | | | | 2155-3644 |
| | | | | | 4574-5706 |
| | | | | | 5759-6314 |
| HLDCW15 | 102 | 705466 | AC073157 | 474 | 1-455 |
| HLDCW15 | 102 | 705466 | AC026108 | 475 | 1-456 |
| HLDCU74 | 103 | 765307 | AC010552 | 476 | 1-124 |
| | | | | | 204-361 |
| | | | | | 846-1101 |
| | | | | | 1203-1316 |
| | | | | | 143 8-1596 |
| | | | | | 1736-2460 |
| | | | | | 2620-2970 |
| | | | | | 3071-3168 |
| | | | | | 3402-3481 |
| | | | | | 3546-3926 |
| | | | | | 4137-4839 |
| HLDCU74 | 103 | 765307 | AC007604 | 477 | 1-124 |
| | | | | | 204-3 48 |
| HLDCU74 | 103 | 765307 | AC010552 | 478 | 1-584 |
| | | | | | 1055-1576 |
| | | | | | 1787-1894 |
| | | | | | 2122-2214 |
| | | | | | 2235-2633 |
| | | | | | 2694-3015 |
| | | | | | 3459-3814 |
| HLDCU74 | 103 | 765307 | AC010552 | 479 | 1-128 |
| | | | | | 465-972 |
| | | | | | 1024-1240 |
| | | | | | 1643-1841 |
| HLDCU74 | 103 | 765307 | AC007604 | 480 | 1-243 |
| HLDCE01 | 104 | 916444 | AL360154 | 481 | 1-297 |
| HLDCE01 | 104 | 916444 | AC053486 | 482 | 1-298 |
| HLDCE01 | 104 | 916444 | AL360154 | 483 | 1-372 |
| HLDCE01 | 104 | 916444 | AC053486 | 484 | 1-247 |
| | | | | | 2052-2405 |
| HLDBW64 | 105 | 746545 | AC067872 | 485 | 1-747 |
| HLDBW64 | 105 | 746545 | AC022958 | 486 | 1-480 |
| HLDBV65 | 106 | 764915 | AC034249 | 487 | 1-53 |
| | | | | | 159-352 |
| | | | | | 440-544 |
| | | | | | 949-1027 |
| | | | | | 1365-1498 |
| | | | | | 1745-1933 |
| | | | | | 1944-1980 |
| | | | | | 2105-2239 |
| | | | | | 2503-3541 |
| HLDBV65 | 106 | 764915 | AC008926 | 488 | 1-1055 |
| HLDBV65 | 106 | 764915 | AC025179 | 489 | 1-846 |
| | | | | | 1168-1397 |
| | | | | | 1419-1906 |
| | | | | | 2084-2179 |
| | | | | | 2677-2777 |
| | | | | | 2883-3082 |
| | | | | | 3167-3331 |
| | | | | | 3353-3952 |
| | | | | | 4096-4236 |
| | | | | | 4481-4731 |
| | | | | | 4812-6282 |
| HLDBV65 | 106 | 764915 | AC008814 | 490 | 1-845 |
| | | | | | 1152-1397 |
| | | | | | 1418-1906 |
| | | | | | 2084-2179 |
| | | | | | 2677-2777 |
| | | | | | 2883-3082 |
| | | | | | 3167-3331 |
| | | | | | 3353-3952 |
| | | | | | 4098-4238 |
| | | | | | 4483-4733 |
| | | | | | 4814-6286 |
| HLDBV65 | 106 | 764915 | AC025179 | 491 | 1-225 |
| NLDBV65 | 106 | 764915 | AC008814 | 492 | 1-225 |
| HLDBT71 | 107 | 760347 | AL031666 | 493 | 1-1235 |
| HLDBT71 | 107 | 760347 | AL031666 | 494 | 1-508 |
| HLDBT71 | 107 | 760347 | AL031666 | 495 | 1-648 |
| NLDBN55 | 108 | 731734 | AL356742 | 496 | 1-174 |
| | | | | | 1171-1260 |
| | | | | | 2295-4454 |
| HLDBN55 | 108 | 731734 | AL121722 | 497 | 1-174 |
| | | | | | 1166-1255 |
| | | | | | 2293-4450 |
| HLDBN55 | 108 | 731734 | AL356742 | 498 | 1-407 |
| HLDBN55 | 108 | 731734 | AL121722 | 499 | 1-408 |
| HLDBN38 | 109 | 678424 | AF172277 | 500 | 1-319 |
| | | | | | 928-1709 |
| HLDBN38 | 109 | 678424 | AC007567 | 501 | 1-319 |
| | | | | | 920-1701 |
| HLDBN38 | 109 | 678424 | AF172277 | 502 | 1-475 |
| HLDDN38 | 109 | 678424 | AC007567 | 503 | 1-475 |
| HLDBL09 | 111 | 625542 | AP002026 | 504 | 1-101 |
| | | | | | 1898-2188 |
| | | | | | 2968-3075 |
| | | | | | 3091-3391 |
| | | | | | 5480-5630 |
| | | | | | 6238-6790 |
| | | | | | 7155-7685 |
| | | | | | 8249-8822 |
| | | | | | 8936-9158 |
| | | | | | 10306-10567 |
| | | | | | 11652-11789 |
| | | | | | 12209-12653 |
| | | | | | 13773-14143 |
| | | | | | 14158-14512 |
| | | | | | 14990-16596 |
| HLDBL09 | 111 | 625542 | AP002026 | 505 | 1-266 |
| HLDBE09 | 112 | 625554 | AL355975 | 506 | 1-322 |
| HLDBE09 | 112 | 625554 | AL353577 | 507 | 1-279 |
| HLDBE09 | 112 | 625554 | AL136171 | 508 | 1-61 |
| HLDBE09 | 112 | 625554 | AC068682 | 509 | 1-153 |
| HLDBE09 | 112 | 625554 | AC016142 | 510 | 1-150 |
| HLDBE09 | 112 | 625554 | AC072051 | 511 | 1-310 |
| HLDBE09 | 112 | 625554 | AC034243 | 512 | 1-312 |
| | | | | | 2334-2364 |
| HLDBE09 | 112 | 625554 | AC023309 | 513 | 1-193 |
| HLDBE09 | 112 | 625554 | AC009899 | 514 | 1-175 |
| HLDBE09 | 112 | 625554 | AC073446 | 515 | 1-140 |
| HLDBE09 | 112 | 625554 | AC019092 | 516 | 1-184 |
| HLDBE09 | 112 | 625554 | AL162741 | 517 | 1-45 |
| HLDBE09 | 112 | 625554 | AC008055 | 518 | 1-919 |
| HLDBE09 | 112 | 625554 | AC073446 | 519 | 1-52 |
| | | | | | 2626-2925 |
| HLDBE09 | 112 | 625554 | AC019092 | 520 | 1-268 |
| HLDBE09 | 112 | 625554 | AL162741 | 521 | 1-102 |
| HLDBD09 | 113 | 625551 | AC005390 | 522 | 1-105 |
| | | | | | 116-577 |
| | | | | | 839-1306 |
| | | | | | 1880-2378 |
| | | | | | 3636-3913 |
| | | | | | 4067-4170 |
| | | | | | 4664-4815 |
| | | | | | 4918-5053 |
| | | | | | 5153-5241 |
| | | | | | 5427-5512 |
| HLDBD09 | 113 | 625551 | AC005390 | 523 | 1-393 |
| HLDBD09 | 113 | 625551 | AC005390 | 524 | 1-90 |
| HLDBD02 | 114 | 920039 | AC023648 | 525 | 1-1547 |
| HLDBD02 | 114 | 920039 | AC008121 | 526 | 1-2600 |
| HLDBD02 | 114 | 920039 | AC023648 | 527 | 1-518 |
| HLDBD02 | 114 | 920039 | AC008121 | 528 | 1-518 |
| HLDBD02 | 114 | 920039 | AC008121 | 529 | 1-174 |
| | | | | | 372-628 |
| HLDBC10 | 115 | 964582 | AP000962 | 530 | 1-467 |
| HLDBC10 | 115 | 964582 | AP000962 | 531 | 1-563 |
| HLDBB08 | 117 | 959385 | AC007897 | 532 | 1-206 |
| HLDBB08 | 117 | 959385 | AC022221 | 533 | 1-207 |
| HLDBB08 | 117 | 959385 | AC007897 | 534 | 1-520 |
| HLDBB08 | 117 | 959385 | AC022221 | 535 | 1-339 |
| HLDBB08 | 117 | 959385 | AC007897 | 536 | 1-339 |
| HLDAV58 | 118 | 736027 | AC025712 | 537 | 1-1822 |
| | | | | | 1892-2371 |
| HLDAV38 | 119 | 709140 | AC036191 | 538 | 1-146 |
| HLDAV38 | 119 | 709140 | AC068657 | 539 | 1-106 |
| HLDAV38 | 119 | 709140 | AC022850 | 540 | 1-93 |
| HLDAV38 | 119 | 709140 | AC023329 | 541 | 1-101 |
| HLDAV38 | 119 | 709140 | AC023230 | 542 | 1-105 |
| HLDAV38 | 119 | 709140 | AC073076 | 543 | 1-32 |
| HLDAV38 | 119 | 709140 | AC037451 | 544 | 1-89 |
| HLDAV38 | 119 | 709140 | AC016124 | 545 | 1-98 |
| HLDAV38 | 119 | 709140 | AL355501 | 546 | 1-201 |
| HLDAV38 | 119 | 709140 | AC069380 | 547 | 1-238 |
| HLDAV38 | 119 | 709140 | AC026507 | 548 | 1-100 |
| HLDAV38 | 119 | 709140 | AC069191 | 549 | 1-102 |
| HLDAV38 | 119 | 709140 | AC008738 | 550 | 1-90 |
| HLDAV38 | 119 | 709140 | AC022315 | 551 | 1-106 |
| HLDAV38 | 119 | 709140 | AC068152 | 552 | 1-104 |
| HLDAV38 | 119 | 709140 | AC023232 | 553 | 1-127 |
| HLDAV38 | 119 | 709140 | AC025302 | 554 | 1-108 |
| HLDAV38 | 119 | 709140 | AC009997 | 555 | 1-117 |
| HLDAV38 | 119 | 709140 | AC009660 | 556 | 1-477 |
| HLDAV38 | 119 | 709140 | AC060763 | 557 | 1-129 |
| HLDAV38 | 119 | 709140 | AL357519 | 558 | 1-100 |
| HLDAV38 | 119 | 709140 | AC027725 | 559 | 1-86 |
| HLDAV38 | 119 | 709140 | AL353799 | 560 | 1-97 |
| HLDAV38 | 119 | 709140 | AC010149 | 561 | 1-91 |
| HLDAV38 | 119 | 709140 | AC068884 | 562 | 1-122 |
| HLDAV38 | 119 | 709140 | AC020991 | 563 | 1-86 |
| HLDAV38 | 119 | 709140 | AL354733 | 564 | 1-50 |
| HLDAV38 | 119 | 709140 | AC067847 | 565 | 1-96 |
| HLDAV38 | 119 | 709140 | AC007022 | 566 | 1-89 |
| HLDAV38 | 119 | 709140 | AL021939 | 567 | 1-68 |
| HLDAV38 | 119 | 709140 | AL354991 | 568 | 1-107 |
| HLDAV38 | 119 | 709140 | AC068397 | 569 | 1-477 |
| HLDAV38 | 119 | 709140 | AC015884 | 570 | 1-207 |
| HLDAV38 | 119 | 709140 | AC024659 | 571 | 1-109 |
| HLDAV38 | 119 | 709140 | AC040893 | 572 | 1-95 |
| HLDAV38 | 119 | 709140 | AC012681 | 573 | 1-477 |
| HLDAV38 | 119 | 709140 | AL031622 | 574 | 1-221 |
| HLDAV38 | 119 | 709140 | AL035087 | 575 | 1-66 |
| HLDAV38 | 119 | 709140 | AC068397 | 576 | 1-411 |
| HLDAV38 | 119 | 709140 | AC015884 | 577 | 1-131 |
| HLDAV38 | 119 | 709140 | AC023232 | 578 | 1-105 |
| HLDAV13 | 120 | 657191 | AC021312 | 579 | 1-472 |
| HLDAV13 | 120 | 657191 | AC011405 | 580 | 1-471 |
| HLDAV13 | 120 | 657191 | AC011405 | 581 | 1-738 |
| HLDAV13 | 120 | 657191 | AC011405 | 582 | 1-534 |
| HLDAV01 | 121 | 916462 | AC011004 | 583 | 1-1182 |
| HLDAV01 | 121 | 916462 | AC011004 | 584 | 1-289 |
| HLDAV01 | 121 | 916462 | AC011004 | 585 | 1-190 |
| HLDAR12 | 122 | 970634 | AC055739 | 586 | 1-486 |
| HLDAR12 | 122 | 970634 | AC068978 | 587 | 1-486 |
| HLDAR12 | 122 | 970634 | AC055739 | 588 | 1-347 |
| HLDAR12 | 122 | 970634 | AC068978 | 589 | 1-347 |
| HHNAC01 | 126 | 913646 | AC021051 | 590 | 1-722 |
| HHNAC01 | 126 | 913646 | AC016951 | 591 | 1-723 |
| HHNAC01 | 126 | 913646 | AC021051 | 592 | 1-121 |
| HHNAC01 | 126 | 913646 | AC016951 | 593 | 1-93 |
| | | | | | 138-607 |
| HHNAB42 | 127 | 714097 | AC016543 | 594 | 1-487 |
| HHNAB42 | 127 | 714097 | AC016543 | 595 | 1-436 |
| HHLAB49 | 128 | 723222 | AC006360 | 596 | 1-516 |
| HHLAB49 | 128 | 723222 | AC006360 | 597 | 1-182 |
| HFVJW07 | 130 | 951883 | AC036214 | 598 | 1-225 |
| | | | | | 684-919 |
| | | | | | 1025-1542 |
| | | | | | 1986-2693 |
| HFVJW07 | 130 | 951883 | AC018952 | 599 | 1-225 |
| | | | | | 684-919 |
| | | | | | 1025-1542 |
| | | | | | 1986-2693 |
| HFVJW07 | 130 | 951883 | AC036214 | 600 | 1-100 |
| HFVJW07 | 130 | 951883 | AC018952 | 601 | 1-90 |
| HFVIP01 | 131 | 914567 | AF267169 | 602 | 1-187 |
| | | | | | 632-1013 |
| | | | | | 1430-1516 |
| | | | | | 2138-2236 |
| | | | | | 4981-5178 |
| | | | | | 5948-6423 |
| | | | | | 7410-7564 |
| | | | | | 8801-8916 |
| | | | | | 10587-10760 |
| | | | | | 13561-13805 |
| | | | | | 14535-14973 |
| | | | | | 16194-16326 |
| | | | | | 17706-18167 |
| | | | | | 20341-20456 |
| | | | | | 21993-22161 |
| | | | | | 22238-22315 |
| | | | | | 23495-23581 |
| | | | | | 23869-23982 |
| | | | | | 24720-24768 |
| HFVID08 | 133 | 959739 | AL139424 | 603 | 1-518 |
| HFVID08 | 133 | 959739 | AL354956 | 604 | 1-518 |
| HFVID08 | 133 | 959739 | AP001098 | 605 | 1-519 |
| HFVID08 | 133 | 959739 | AL139424 | 606 | 1-184 |
| | | | | | 465-947 |
| | | | | | 1451-1547 |
| HFVID08 | 133 | 959739 | AL354956 | 607 | 1-87 |
| HFVID08 | 133 | 959739 | AL139424 | 608 | 1-87 |
| HFVID08 | 133 | 959739 | AL354956 | 609 | 1-121 |
| | | | | | 728-1210 |
| | | | | | 1462-1753 |
| | | | | | 2251-2540 |
| | | | | | 3707-3907 |
| | | | | | 4171-4653 |
| | | | | | 5157-5254 |
| HFVID08 | 133 | 959739 | AP001098 | 610 | 1-87 |
| HFVIC84 | 134 | 783131 | AL137838 | 611 | 1-1313 |
| HFVIC84 | 134 | 783131 | AL357497 | 612 | 1-1312 |
| HFVIC84 | 134 | 783131 | AL121955 | 613 | 1-48 |
| | | | | | 1820-2272 |
| | | | | | 5256-5334 |
| | | | | | 5802-5900 |
| | | | | | 8568-8654 |
| | | | | | 9056-9587 |
| | | | | | 10243-10417 |
| | | | | | 11007-11107 |
| | | | | | 11236-11537 |
| | | | | | 12632-12779 |
| | | | | | 13023-13505 |
| | | | | | 14983-15107 |
| | | | | | 17710-21082 |
| | | | | | 21618-22251 |
| | | | | | 22477-23328 |
| | | | | | 23353-24664 |
| HFVIC84 | 134 | 783131 | AL137838 | 614 | 1-830 |
| HFVIC84 | 134 | 783131 | AL357497 | 615 | 1-852 |
| HFVIC30 | 135 | 881306 | AC026532 | 616 | 1-163 |
| | | | | | 671-886 |
| | | | | | 1126-1321 |
| | | | | | 1666-2128 |
| | | | | | 2507-2716 |
| | | | | | 3141-4654 |
| | | | | | 4688-4786 |
| | | | | | 5166-5602 |
| HFVIC30 | 135 | 881306 | AC026532 | 617 | 1-376 |
| HFVIC30 | 135 | 881306 | AC026532 | 618 | 1-864 |
| HEVHX74 | 136 | 854533 | AC016498 | 619 | 1-1041 |
| | | | | | 1762-2148 |
| | | | | | 3472-3587 |
| | | | | | 5453-5549 |
| | | | | | 6054-6206 |
| | | | | | 6459-6764 |
| | | | | | 8027-8438 |
| | | | | | 9092-9355 |
| | | | | | 9588-9697 |
| | | | | | 9963-10062 |
| | | | | | 10857-10923 |
| | | | | | 13827-13903 |
| | | | | | 14610-15375 |
| | | | | | 16617-16709 |
| | | | | | 17501-17556 |
| | | | | | 20068-20197 |
| | | | | | 21908-22077 |
| | | | | | 23772-23984 |
| | | | | | 24062-24255 |
| | | | | | 24949-25427 |
| | | | | | 25454-25951 |
| | | | | | 26889-27275 |
| | | | | | 27311-27604 |
| | | | | | 27695-27842 |
| | | | | | 29385-29502 |
| | | | | | 30155-30270 |
| | | | | | 30293-30398 |
| | | | | | 30726-30785 |
| | | | | | 32789-32924 |
| | | | | | 33493-33530 |
| | | | | | 33629-34009 |
| | | | | | 34568-34783 |
| | | | | | 34828-35259 |
| | | | | | 35678-35755 |
| | | | | | 36764-37068 |
| | | | | | 38373-38508 |
| | | | | | 39024-39320 |
| | | | | | 40648-40761 |
| | | | | | 41243-41496 |
| | | | | | 41522-41961 |
| | | | | | 42232-42658 |
| | | | | | 44403-44612 |
| | | | | | 45298-45337 |
| | | | | | 46285-46388 |
| | | | | | 47512-47616 |
| | | | | | 48568-48964 |
| | | | | | 49102-49948 |
| | | | | | 51280-51449 |
| | | | | | 51752-52159 |
| | | | | | 52293-53127 |
| HFVHX74 | 136 | 854533 | AP001130 | 620 | 1-158 |
| | | | | | 463-870 |
| | | | | | 1004-1838 |
| HFVHX74 | 136 | 854533 | AC016498 | 621 | 1-546 |
| HFVHX74 | 136 | 854533 | AP001130 | 622 | 1-546 |
| HFVHX74 | 136 | 854533 | AP001130 | 623 | 1-847 |
| HFVHR05 | 138 | 932181 | AC012251 | 624 | 1-1623 |
| HFVHR05 | 138 | 932181 | AC009557 | 625 | 1-644 |
| HFVHR05 | 138 | 932181 | AC009557 | 626 | 1-386 |
| HFVHR05 | 138 | 932181 | AC009557 | 627 | 1-179 |
| HFVGM12 | 141 | 971182 | AL358773 | 628 | 1-2493 |
| HFVGM12 | 141 | 971182 | AL356607 | 629 | 1-1712 |
| HFVGM12 | 141 | 971182 | AL358773 | 630 | 1-1516 |
| HFLUE22 | 145 | 522779 | AC078803 | 631 | 1-216 |
| HFLUE22 | 145 | 522779 | AC078803 | 632 | 1-309 |
| | | | | | 3508-3802 |
| HFLUE22 | 145 | 522779 | AC078803 | 633 | 1-679 |
| HFLQJ68 | 147 | 753216 | AC023761 | 634 | 1-245 |
| | | | | | 382-523 |
| HELQJ68 | 147 | 753216 | AC021823 | 635 | 1-245 |
| | | | | | 382-523 |
| HFLQJ68 | 147 | 753216 | AC021823 | 636 | 1-399 |
| HFLQJ68 | 147 | 753216 | AC023761 | 637 | 1-399 |
| HALSD90 | 150 | 500844 | AL358788 | 638 | 1-326 |
| HALSD90 | 150 | 500844 | AL035703 | 639 | 1-326 |
| HALSD90 | 150 | 500844 | AL358788 | 640 | 1-303 |
| HALSD90 | 150 | 500844 | AL358788 | 641 | 1-169 |
| HALSD90 | 150 | 500844 | AL035703 | 642 | 1-169 |
| HALSD90 | 150 | 500844 | AL035703 | 643 | 1-281 |
| HALSD51 | 151 | 500852 | AL358785 | 644 | 1-257 |
| | | | | | 287-692 |
| | | | | | 1417-1580 |
| | | | | | 2345-2567 |
| | | | | | 3689-4208 |
| | | | | | 59 13-6558 |
| | | | | | 6925-7555 |
| | | | | | 7993-8428 |
| | | | | | 9734-10170 |
| | | | | | 10340-10967 |
| | | | | | 10992-11330 |
| | | | | | 12284-14337 |
| HALSD51 | 151 | 500852 | AC005678 | 645 | 1-257 |
| | | | | | 287-692 |
| | | | | | 1417-1580 |
| | | | | | 2345-2567 |
| | | | | | 3689-4208 |
| | | | | | 5913-6558 |
| | | | | | 6925-7555 |
| | | | | | 7993-8428 |
| | | | | | 9734-10170 |
| | | | | | 10340-10967 |
| | | | | | 10992-11330 |
| | | | | | 12284-13526 |
| HALSD51 | 151 | 500852 | AC005678 | 646 | 1-781 |
| HALSD51 | 151 | 500852 | AL358785 | 647 | 1-102 |
| HALSD34 | 152 | 509765 | AC025648 | 648 | 1-360 |
| HALSD34 | 152 | 509765 | AC025062 | 649 | 1-360 |
| HALSD34 | 152 | 509765 | AC025648 | 650 | 1-353 |
| HALSD03 | 153 | 960910 | AC025389 | 651 | 1-382 |
| HALSD03 | 153 | 960910 | AC025389 | 652 | 1-449 |
| HALSD03 | 153 | 960910 | AC025389 | 653 | 1-387 |
| | | | | | 1195-2050 |
| | | | | | 2234-2844 |
| HALSC37 | 154 | 705894 | AL359926 | 654 | 1-303 |
| HALSC37 | 154 | 705894 | AL359175 | 655 | 1-303 |
| HALSC37 | 154 | 705894 | AL359926 | 656 | 1-337 |
| HALSC18 | 155 | 667044 | AC068037 | 657 | 1-346 |
| HALSC18 | 155 | 667044 | AC068037 | 658 | 1-492 |

[0046] Table 1B summarizes additional polynucleotides encompassed by the invention (including cDNA clones related to the sequences (Clone ID NO:Z), contig sequences (contig identifier (Contig ID:) contig nucleotide sequence identifiers (SEQ ID NO:X)), and genomic sequences (SEQ ID NO:B). The first column provides a unique clone identifier, “Clone ID NO:Z”, for a cDNA clone related to each contig sequence. The second column provides the sequence identifier, “SEQ ID NO:X”, for each contig sequence. The third column provides a unique contig identifier, “Contig ID:” for each contig sequence. The fourth column, provides a BAC identifier “BAC ID NO:A” for the BAC clone referenced in the corresponding row of the table. The fifth column provides the nucleotide sequence identifier, “SEQ ID NO:B” for a fragment of the BAC clone identified in column four of the corresponding row of the table. The sixth column, “Exon From-To”, provides the location (i.e., nucleotide position numbers) within the polynucleotide sequence of SEQ ID NO:B which delineate certain polynucleotides of the invention that are also exemplary members of polynucleotide sequences that encode polypeptides of the invention (e.g., polypeptides containing amino acid sequences encoded by the polynucleotide sequences delineated in column six, and fragments and variants thereof).

TABLE 2

| | | SEQ | | | | Score/ | | |
|---|---|---|---|---|---|---|---|---|
| Clone ID | Contig | ID | Analysis | | PFam/NR Accession | Percent | | |
| NO:Z | ID: | NO:X | Method | PFam/NR Description | Number | Identity | NT From | NT To |
| HFLQA82 | 757380 | 20 | HMMER | PFAM: C2 domain | PF00168 | 3.08 | 52 | 90 |
| | | | 1.8 | | | | | |
| HFLSH67 | 968639 | 23 | blastx.2 | (AF010144) neuronal | gb\|AAC08737.1\| | 68% | 174 | 269 |
| | | | | thread protein AD7c-NTP | | 67% | 176 | 268 |
| | | | | [Homo sapiens] | | 56% | 291 | 359 |
| | | | | | | 46% | 270 | 359 |
| HFLSK11 | 964908 | 26 | HMMER | PFAM: Bacterial mutT | PF00293 | 3.01 | 159 | 197 |
| | | | 1.8 | protein | | | | |
| HFLUF43 | 928026 | 29 | blastx.2 | (AF090894) PR00113 | gb\|AAF24018.1\|AF0 | 67% | 853 | 716 |
| | | | | [Homo sapiens] | 90894_1 | | | |
| HFLVI15 | 921860 | 33 | blastx.2 | 5-methyltetrahydrofolate- | emb\|CAA34601.1\| | 97% | 320 | 9 |
| | | | | homocysteine transferase | | 82% | 379 | 329 |
| | | | | (AA 1-1200) 1 | | 36% | 441 | 319 |
| HFVHF81 | 929124 | 41 | HMMER | PFAM: Ubiquitin | PF00442 | 10.34 | 187 | 210 |
| | | | 1.8 | carboxyl-terminal | | | | |
| | | | | hydrolases family 2 | | | | |
| HLDBJ86 | 882365 | 47 | blastx.2 | (AF097518) liver-specific | gb\|AAD37091.1\|AF0 | 74% | 35 | 334 |
| | | | | transporter [Homo | 97518_1 | 100% | 378 | 431 |
| | | | | sapiens] | | | | |
| HLDDI91 | 790003 | 48 | HMMER | PFAM: RNA recognition | PF00076 | 60.16 | 393 | 590 |
| | | | 1.8 | motif. (aka RRM, RBD, | | | | |
| | | | | or RNP domain) | | | | |
| | | | blastx.2 | (AF209192) Apobec-1 | gb\|AAF34824.1\|AF2 | 100% | 2 | 244 |
| | | | | complementation factor | 09192_1 | 96% | 351 | 602 |
| | | | | [Homo 1 | | 97% | 244 | 348 |
| | | | | | | 16% | 104 | 262 |
| HLDOA63 | 949166 | 49 | HMMER | PFAM: NTR/C345C | PF01759 | 34.1 | 144 | 323 |
| | | | 2.1.1 | module | | | | |
| | | | blastx.2 | complement C3 protein | gb\|AAA37038.1\| | 35% | 72 | 449 |
| | | | | (GPC3) precursor [Cavia | | | | |
| | | | | porcellus] | | | | |
| HLDRD54 | 727954 | 57 | blastx.2 | (AF090944) PR00663 | gb\|AAF24056.1\|AF0 | 62% | 121 | 240 |
| | | | | [Homo sapiens] | 90944_1 | | | |
| HLDRQ82 | 837031 | 60 | blastx.2 | (AF064255) very long- | gb\|AAD29444.1\|AF0 | 100% | 325 | 582 |
| | | | | chain acyl-CoA synthetase | 64255_1 | 87% | 143 | 340 |
| | | | | homolog 2; VLCS-H2 | | 100% | 3 | 140 |
| | | | | [Homo sapiens] | | | | |
| HLICR73 | 837030 | 64 | HMMER | PFAM: AMP-binding | PF00501 | 20.33 | 19 | 324 |
| | | | 1.8 | enzymes | | | | |
| | | | blastx.2 | (AF064255) very long- | gb\|AAD29444.1\|AF0 | 99% | 1 | 441 |
| | | | | chain acyl-CoA synthetase | 64255_1 | 100% | 450 | 497 |
| | | | | homolog 2; VLCS-H2 | | | | |
| | | | | [Homo sapiens] | | | | |
| HUTAF08 | 958353 | 68 | blastx.2 | ORF1; MER37; putative | gb\|AAB61714.1\| | 65% | 390 | 295 |
| | | | | transposase similar to | | 66% | 478 | 386 |
| | | | | pogo element [Homo | | | | |
| | | | | sapiens] | | | | |
| HLPBA84 | 912828 | 69 | blastx.2 | (AK000241) unnamed | dbj\|BAA91028.1\| | 73% | 21 | 143 |
| | | | | protein product [Homo | | 36% | 412 | 477 |
| | | | | sapiens] | | | | |
| HLDOS76 | 770016 | 90 | blastx.2 | (AK000496) unnamed | dbj\|BAA91205.1\| | 68% | 461 | 270 |
| | | | | protein product [Homo | | | | |
| | | | | sapiens] | | | | |
| HLDOK25 | 678063 | 92 | blastx.2 | (AF118082) PRO1902 | gb\|AAF22026.1\|AF1 | 58% | 542 | 426 |
| | | | | [Homo sapiens] | 18094_21 | 66% | 439 | 368 |
| HLDOD83 | 724046 | 94 | blastx.2 | (AF169017) | gb\|AAF15558.1\|AF1 | 98% | 625 | 296 |
| | | | | formiminotransferase | 69017_1 | 88% | 309 | 232 |
| | | | | cyclodeaminase [Homo | | 100% | 662 | 633 |
| | | | | sapiens] | | | | |
| HLDOC67 | 689240 | 95 | blastx.2 | (AF182510) ECSIT [Mus | gb\|AAF01219.1\|AF1 | 64% | 129 | 320 |
| | | | | musculus] | 82510_1 | 83% | 2 | 145 |
| | | | | | | 45% | 326 | 451 |
| HLDNL57 | 963552 | 99 | blastx.2 | (AK001778) unnamed | dbj\|BAA91904.1\| | 100% | 115 | 267 |
| | | | | protein product [Homo | | 96% | 42 | 119 |
| | | | | sapiens] | | 93% | 2 | 49 |
| HLDBV65 | 764915 | 106 | HMMER | PFAM: POLO box | PF00659 | 88.3 | 214 | 378 |
| | | | 2.1.1 | duplicated region. | | | | |
| | | | blastx.2 | (AF059617) serum- | gb\|AAC14573.1\| | 98% | 208 | 402 |
| | | | | inducible kinase [Homo | | 100% | 3 | 83 |
| | | | | sapiens] | | | | |
| HLDBN55 | 731734 | 108 | blastx.2 | (AB028021) hepatocyte | dbj\|BAA78106.1\| | 100% | 45 | 221 |
| | | | | nuclear factor-3 beta | | | | |
| | | | | [Homo sapiens] | | | | |
| HLDBN03 | 924100 | 110 | blastx.2 | (AK001542) unnamed | dbj\|BAA91748.1\| | 100% | 3 | 362 |
| | | | | protein product [Homo | | 81% | 413 | 694 |
| | | | | sapiens] | | 100% | 364 | 411 |
| HLDBE09 | 625554 | 112 | blastx.2 | (AK000385) unnamed | dbj\|BAA91131.1\| | 73% | 424 | 290 |
| | | | | protein product [Homo | | 65% | 291 | 223 |
| | | | | sapiens] | | 100% | 221 | 180 |
| HLDBD02 | 920039 | 114 | blastx.2 | (AF113685) PR00974 | gb\|AAF29584.1\|AF1 | 52% | 2 | 247 |
| | | | | [Homo sapiens] | 13685_1 | | | |
| HLDBB21 | 713680 | 116 | HMMER | PFAM: Elongation factor | PF00009 | 44.67 | 2 | 166 |
| | | | 1.8 | Tu family (contains | | | | |
| | | | | ATP/GTP binding P-loop) | | | | |
| | | | blastx.2 | mitochondrial elongation | emb\|CAA59169.1\| | 96% | 152 | 376 |
| | | | | factor Tu [Homo sapiens] | | 98% | 2 | 166 |
| HLDAV38 | 709140 | 119 | blastx.2 | (AF118086) PR01992 | gb\|AAF22030.1\|AF1 | 78% | 8 | 106 |
| | | | | [Homo sapiens] | 18094_25 | | | |
| HLDAK33 | 857107 | 123 | blastx.2 | (AF072441) calcineurin | gb\|AAD40846.1\|AF0 | 98% | 445 | 2 |
| | | | | binding protein cabin 1 | 72441_1 | | | |
| | | | | [Homo sapiens] | | | | |
| HFVKC87 | 886358 | 129 | blastx.2 | IDN4-GGTR14 | sp\|Q9Y6Y5\|Q9Y6Y5 | 100% | 1 | 87 |
| | | | | PROTEIN. | | | | |
| HFVIC30 | 881306 | 135 | blastx.2 | (AF097518) liver-specific | gb\|AAD37091.1\|AF0 | 76% | 6 | 290 |
| | | | | transporter [Homo | 97518_1 | 75% | 329 | 424 |
| | | | | sapiens] | | 84% | 289 | 363 |
| HFLVG70 | 757521 | 143 | blastx.2 | (AL050294) hypothetical | emb\|CAB43393.1\| | 64% | 87 | 161 |
| | | | | protein [Homo sapiens] | | 80% | 322 | 381 |
| | | | | | | 50% | 13 | 75 |
| | | | | | | 33% | 4 | 57 |
| HFLQJ68 | 753216 | 147 | HMMER | PFAM: Zinc finger, C2H2 | PF00096 | 4.86 | 90 | 158 |
| | | | 1.8 | type | | | | |
| HFLQJ38 | 709034 | 148 | blastx.2 | (AK000324) unnamed | dbj\|BAA91086.1\| | 53% | 3 | 299 |
| | | | | protein product [Homo | | 69% | 196 | 342 |
| | | | | sapiens] | | | | |
| HALSD90 | 500844 | 150 | blastx.2 | (AF003535) ORF2-like | gb\|AAD04635.1\| | 47% | 231 | 10 |
| | | | | protein [Homo sapiens] | | 55% | 340 | 233 |
| HALSC18 | 667044 | 155 | blastx.2 | (AF090942) PR00657 | gb\|AAF24054.1\|AF0 | 61% | 108 | 320 |
| | | | | [Homo sapiens] | 90942_1 | | | |

[0047] Table 2 further characterizes certain encoded polypeptides of the invention, by providing the results of comparisons to protein and protein family databases. The first column provides a unique clone identifier, “Clone ID NO:”, corresponding to a cDNA clone disclosed in Table 1A. The second column provides the unique contig indentifier, “Contig ID:” which allows correlation with the information in Table 1A. The third column provides the sequence identifier, “SEQ ID NO:X”, for the contig polynucleotide sequences. The fourth column provides the analysis method by which the homology/identity disclosed in the row was determined. The fifth column provides a description of PFam/NR hits having significant matches identified by each analysis. Column six provides the accession number of the PFam/NR hit disclosed in the fifth column. Column seven, “Score/Percent Identity”, provides a quality score or the percent identity, of the hit disclosed in column five. Comparisons were made between polypeptides encoded by polynucleotides of the invention and a non-redundant protein database (herein referred to as “NR”), or a database of protein families (herein referred to as “PFam”), as described below.

[0048] The NR database, which comprises the NBRF PIR database, the NCBI GenPept database, and the SIB SwissProt and TrEMBL databases, was made non-redundant using the computer program nrdb2 (Warren Gish, Washington University in Saint Louis). Each of the polynucleotides shown in Table 1A, column 3 (e.g., SEQ ID NO:X or the ‘Query’ sequence) was used to search against the NR database. The computer program BLASTX was used to compare a 6-frame translation of the Query sequence to the NR database (for information about the BLASTX algorithm please see Altshul et al., J. Mol. Biol. 215:403-410 (1990), and Gish et al., Nat. Genet. 3:266-272 (1993)). A description of the sequence that is most similar to the Query sequence (the highest scoring ‘Subject’) is shown in column five of Table 2 and the database accession number for that sequence is provided in column six. The highest scoring ‘Subject’ is reported in Table 2 if (a) the estimated probability that the match occurred by chance alone is less than 1.0e-07, and (b) the match was not to a known repetitive element. BLASTX returns alignments of short polypeptide segments of the Query and Subject sequences which share a high degree of similarity; these segments are known as High-Scoring Segment Pairs or HSPs. Table 2 reports the degree of similarity between the Query and the Subject for each HSP as a percent identity in Column 7. The percent identity is determined by dividing the number of exact matches between the two aligned sequences in the HSP, dividing by the number of Query amino acids in the HSP and multiplying by 100. The polynucleotides of SEQ ID NO:X which encode the polypeptide sequence that generates an HSP are delineated by columns 8 and 9 of Table 2.

[0049] The PFam database, PFam version 5.2, (Sonnhammer et al., Nucl. Acids Res., 26:320-322, (1998)) consists of a series of multiple sequence alignments; one alignment for each protein family. Each multiple sequence alignment is converted into a probability model called a Hidden Markov Model, or HMM, that represents the position-specific variation among the sequences that make up the multiple sequence alignment (see, e.g., R. Durbin et al., Biological sequence analysis: probabilistic models of proteins and nucleic acids, Cambridge University Press, 1998 for the theory of HMMs). The program HMMER version 1.8 (Sean Eddy, Washington University in Saint Louis) was used to compare the predicted protein sequence for each Query sequence (SEQ ID NO:Y in Table 1A) to each of the HMMs derived from PFam version 5.2. A HMM derived from PFam version 5.2 was said to be a significant match to a polypeptide of the invention if the score returned by HMMER 1.8 was greater than 0.8 times the HMMER 1.8 score obtained with the most distantly related known member of that protein family. The description of the PFam family which shares a significant match with a polypeptide of the invention is listed in column 5 of Table 2, and the database accession number of the PFam hit is provided in column 6. Column 7 provides the score returned by HMMER version 1.8 for the alignment. Columns 8 and 9 delineate the polynucleotides of SEQ ID NO:X which encode the polypeptide sequence which shows a significant match to a PFam protein family.

[0050] As mentioned, columns 8 and 9 in Table 2, “NT From” and “NT To”, delineate the polynucleotides of “SEQ ID NO:X” that encode a polypeptide having a significant match to the PFam/NR database as disclosed in the fifth column of Table 2. In one embodiment, the invention provides a protein comprising, or alternatively consisting of, a polypeptide encoded by the polynucleotides of SEQ ID NO:X delineated in columns 8 and 9 of Table 2. Also provided are polynucleotides encoding such proteins, and the complementary strand thereto.

[0051] The nucleotide sequence SEQ ID NO:X and the translated SEQ ID NO:Y are sufficiently accurate and otherwise suitable for a variety of uses well known in the art and described further below. For instance, the nucleotide sequences of SEQ ID NO:X are useful for designing nucleic acid hybridization probes that will detect nucleic acid sequences contained in SEQ ID NO:X or the cDNA contained in Clone ID NO:Z. These probes will also hybridize to nucleic acid molecules in biological samples, thereby enabling immediate applications in chromosome mapping, linkage analysis, tissue identification and/or typing, and a variety of forensic and diagnostic methods of the invention. Similarly, polypeptides identified from SEQ ID NO:Y may be used to generate antibodies which bind specifically to these polypeptides, or fragments thereof, and/or to the polypeptides encoded by the cDNA clones identified in, for example, Table 1A.

[0052] Nevertheless, DNA sequences generated by sequencing reactions can contain sequencing errors. The errors exist as misidentified nucleotides, or as insertions or deletions of nucleotides in the generated DNA sequence. The erroneously inserted or deleted nucleotides cause frame shifts in the reading frames of the predicted amino acid sequence. In these cases, the predicted amino acid sequence diverges from the actual amino acid sequence, even though the generated DNA sequence may be greater than 99.9% identical to the actual DNA sequence (for example, one base insertion or deletion in an open reading frame of over 1000 bases).

[0053] Accordingly, for those applications requiring precision in the nucleotide sequence or the amino acid sequence, the present invention provides not only the generated nucleotide sequence identified as SEQ ID NO:X, and a predicted translated amino acid sequence identified as SEQ ID NO:Y, but also a sample of plasmid DNA containing cDNA Clone ID NO:Z (deposited with the ATCC on Oct. 5, 2000, and receiving ATCC designation numbers PTA 2574 and PTA 2575; deposited with the ATCC on Jan. 5, 2001, having the depositor reference numbers TS-l, TS-2, AC-1, and AC-2; and/or as set forth, for example, in Table 1A, 6 and 7). The nucleotide sequence of each deposited clone can readily be determined by sequencing the deposited clone in accordance with known methods. Further, techniques known in the art can be used to verify the nucleotide sequences of SEQ ID NO:X.

[0054] The predicted amino acid sequence can then be verified from such deposits. Moreover, the amino acid sequence of the protein encoded by a particular clone can also be directly determined by peptide sequencing or by expressing the protein in a suitable host cell containing the deposited human cDNA, collecting the protein, and determining its sequence.

### RACE Protocol For Recovery of Full-Length Genes

[0055] Partial cDNA clones can be made full-length by utilizing the rapid amplification of cDNA ends (RACE) procedure described in Frohman, M. A., et al., Proc. Nat'l. Acad. Sci. USA, 85:8998-9002 (1988). A cDNA clone missing either the 5′ or 3′ end can be reconstructed to include the absent base pairs extending to the translational start or stop codon, respectively. In some cases, cDNAs are missing the start codon of translation. The following briefly describes a modification of this original 5′ RACE procedure. Poly A+ or total RNA is reverse transcribed with Superscript II (Gibco/BRL) and an antisense or complementary primer specific to the cDNA sequence. The primer is removed from the reaction with a Microcon Concentrator (Amicon). The first-strand cDNA is then tailed with dATP and terminal deoxynucleotide transferase (Gibco/BRL). Thus, an anchor sequence is produced which is needed for PCR amplification. The second strand is synthesized from the dA-tail in PCR buffer, Taq DNA polymerase (Perkin-Elmer Cetus), an oligo-dT primer containing three adjacent restriction sites (XhoI, SalI and ClaI) at the 5′ end and a primer containing just these restriction sites. This double-stranded cDNA is PCR amplified for 40 cycles with the same primers as well as a nested cDNA-specific antisense primer. The PCR products are size-separated on an ethidium bromide-agarose gel and the region of gel containing cDNA products the predicted size of missing protein-coding DNA is removed. cDNA is purified from the agarose with the Magic PCR Prep kit (Promega), restriction digested with XhoI or SalI, and ligated to a plasmid such as pBluescript SKII (Stratagene) at XhoI and EcoRV sites. This DNA is transformed into bacteria and the plasmid clones sequenced to identify the correct protein-coding inserts. Correct 5′ ends are confirmed by comparing this sequence with the putatively identified homologue and overlap with the partial cDNA clone. Similar methods known in the art and/or commercial kits are used to amplify and recover 3′ ends.

[0056] Several quality-controlled kits are commercially available for purchase. Similar reagents and methods to those above are supplied in kit form from Gibco/BRL for both 5′ and 3′ RACE for recovery of full length genes. A second kit is available from Clontech which is a modification of a related technique, SLIC (single-stranded ligation to single-stranded cDNA), developed by Dumas et al., Nucleic Acids Res., 19:5227-32 (1991). The major differences in procedure are that the RNA is alkaline hydrolyzed after reverse transcription and RNA ligase is used to join a restriction site-containing anchor primer to the first-strand cDNA. This obviates the necessity for the dA-tailing reaction which results in a polyT stretch that is difficult to sequence past.

[0057] An alternative to generating 5′ or 3′ cDNA from RNA is to use cDNA library double-stranded DNA. An asymmetric PCR-amplified antisense cDNA strand is synthesized with an antisense cDNA-specific primer and a plasmid-anchored primer.

[0058] These primers are removed and a symmetric PCR reaction is performed with a nested cDNA-specific antisense primer and the plasmid-anchored primer. RNA Ligase Protocol For Generating The 5′ or 3′ End Sequences To Obtain Full Length Genes

[0059] Once a gene of interest is identified, several methods are available for the identification of the 5′ or 3′ portions of the gene which may not be present in the original cDNA plasmid. These methods include, but are not limited to, filter probing, clone enrichment using specific probes and protocols similar and identical to 5′ and 3′ RACE. While the full length gene may be present in the library and can be identified by probing, a useful method for generating the 5′ or 3′ end is to use the existing sequence information from the original cDNA to generate the missing information. A method similar to 5′ RACE is available for generating the missing 5′ end of a desired full-length gene. (This method was published by Fromont-Racine et al., Nucleic Acids Res., 21(7):1683-1684 (1993)). Briefly, a specific RNA oligonucleotide is ligated to the 5′ ends of a population of RNA presumably containing full-length gene RNA transcript. A primer set containing a primer specific to the ligated RNA oligonucleotide and a primer specific to a known sequence of the gene of interest, is used to PCR amplify the 5′ portion of the desired full length gene which may then be sequenced and used to generate the full length gene. This method starts with total RNA isolated from the desired source, poly A RNA may be used but is not a prerequisite for this procedure. The RNA preparation may then be treated with phosphatase if necessary to eliminate 5′ phosphate groups on degraded or damaged RNA, which may interfere with the later RNA ligase step. The phosphatase, if used, is then inactivated and the RNA is treated with tobacco acid pyrophosphatase in order to remove the cap structure present at the 5′ ends of messenger RNAs. This reaction leaves a 5′ phosphate group at the 5′ end of the cap cleaved RNA which can then be ligated to an RNA oligonucleotide using T4 RNA ligase. This modified RNA preparation can then be used as a template for first strand cDNA synthesis using a gene specific oligonucleotide. The first strand synthesis reaction can then be used as a template for PCR amplification of the desired 5′ end using a primer specific to the ligated RNA oligonucleotide and a primer specific to the known sequence of the liver antigen of interest. The resultant product is then sequenced and analyzed to confirm that the 5′ end sequence belongs to the relevant liver antigen.

[0060] The present invention also relates to vectors or plasmids, which include such DNA sequences, as well as the use of the DNA sequences. The material deposited with the ATCC (deposited with the ATCC on Oct. 5, 2000, and receiving ATCC designation numbers PTA 2574 and PTA 2575; deposited with the ATCC on January 5, 2001, having the depositor reference numbers TS-1, TS-2, AC-1, and AC-2; and/or as set forth, for example, in Table 1 A, 6 and 7) is a mixture of cDNA clones derived from a variety of human tissue and cloned in either a plasmid vector or a phage vector, as shown, for example, in Table 7. These deposits are referred to as “the deposits” herein. The tissues from which some of the clones were derived are listed in Table 7, and the vector in which the corresponding cDNA is contained is also indicated in Table 7. The deposited material includes cDNA clones corresponding to SEQ ID NO:X described, for example, in Table 1A (Clone ID NO:Z). A clone which is isolatable from the ATCC Deposits by use of a sequence listed as SEQ ID NO:X, may include the entire coding region of a human gene or in other cases such clone may include a substantial portion of the coding region of a human gene. Furthermore, although the sequence listing may in some instances list only a portion of the DNA sequence in a clone included in the ATCC Deposits, it is well within the ability of one skilled in the art to sequence the DNA included in a clone contained in the ATCC Deposits by use of a sequence (or portion thereof) described in, for example Tables 1A or 2 by procedures hereinafter further described, and others apparent to those skilled in the art.

[0061] Also provided in Table 7 is the name of the vector which contains the cDNA clone. Each vector is routinely used in the art. The following additional information is provided for convenience.

[0062] Vectors Lambda Zap (U.S. Pat. Nos. 5,128,256 and 5,286,636), Uni-Zap XR (U.S. Pat. Nos. 5,128,256 and 5,286,636), Zap Express (U.S. Pat. Nos. 5,128,256 and 5,286,636), pBluescript (pBS) (Short, J. M. et al., Nucleic Acids Res. 16:7583-7600 (1988); Alting-Mees, M. A. and Short, J. M., Nucleic Acids Res. 17:9494 (1989)) and pBK (Alting-Mees, M. A. et al., Strategies 5:58-61 (1992)) are commercially available from Stratagene Cloning Systems, Inc., 11011 N. Torrey Pines Road, La Jolla, Calif., 92037. pBS contains an ampicillin resistance gene and pBK contains a neomycin resistance gene. Phagemid pBS may be excised from the Lambda Zap and Uni-Zap XR vectors, and phagemid pBK may be excised from the Zap Express vector. Both phagemids may be transformed into E. coli strain XL-1 Blue, also available from Stratagene.

[0063] Vectors pSportl, pCMVSport 1.0, pCMVSport 2.0 and pCMVSport 3.0, were obtained from Life Technologies, Inc., P. O. Box 6009, Gaithersburg, Md. 20897. All Sport vectors contain an ampicillin resistance gene and may be transformed into E. coli strain DH10B, also available from Life Technologies. See, for instance, Gruber, C. E., et al., Focus 15:59- (1993). Vector lafmid BA (Bento Soares, Columbia University, New York, N.Y.) contains an ampicillin resistance gene and can be transformed into E. coli strain XL-1 Blue. Vector pCR® 2.1, which is available from Invitrogen, 1600 Faraday Avenue, Carlsbad, Calif. 92008, contains an ampicillin resistance gene and may be transformed into E. coli strain DH10B, available from Life Technologies. See, for instance, Clark, J. M., Nuc. Acids Res. 16:9677-9686 (1988) and Mead, D. et al., Bio/Technology 9: (1991).

[0064] The present invention also relates to the genes corresponding to SEQ ID NO:X, SEQ ID NO:Y, and/or the deposited clone (Clone ID NO:Z). The corresponding gene can be isolated in accordance with known methods using the sequence information disclosed herein. Such methods include preparing probes or primers from the disclosed sequence and identifying or amplifying the corresponding gene from appropriate sources of genomic material.

[0065] Also provided in the present invention are allelic variants, orthologs, and/or species homologs. Procedures known in the art can be used to obtain full-length genes, allelic variants, splice variants, full-length coding portions, orthologs, and/or species homologs of liver associated genes corresponding to SEQ ID NO:X or the complement thereof, polypeptides encoded by SEQ ID NO:X or the complement thereof, and/or the cDNA contained in Clone ID NO:Z, using information from the sequences disclosed herein or the clones deposited with the ATCC. For example, allelic variants and/or species homologs may be isolated and identified by making suitable probes or primers from the sequences provided herein and screening a suitable nucleic acid source for allelic variants and/or the desired homologue.

[0066] The polypeptides of the invention can be prepared in any suitable manner. Such polypeptides include isolated naturally occurring polypeptides, recombinantly produced polypeptides, synthetically produced polypeptides, or polypeptides produced by a combination of these methods. Means for preparing such polypeptides are well understood in the art.

[0067] The polypeptides may be in the form of the secreted protein, including the mature form, or may be a part of a larger protein, such as a fusion protein (see below). It is often advantageous to include an additional amino acid sequence which contains secretory or leader sequences, pro-sequences, sequences which aid in purification, such as multiple histidine residues, or an additional sequence for stability during recombinant production.

[0068] The polypeptides of the present invention are preferably provided in an isolated form, and preferably are substantially purified. A recombinantly produced version of a polypeptide, including the secreted polypeptide, can be substantially purified using techniques described herein or otherwise known in the art, such as, for example, by the one-step method described in Smith and Johnson, Gene 67:31-40 (1988). Polypeptides of the invention also can be purified from natural, synthetic or recombinant sources using techniques described herein or otherwise known in the art, such as, for example, antibodies of the invention raised against the liver polypeptides of the present invention in methods which are well known in the art.

[0069] The present invention provides a polynucleotide comprising, or alternatively consisting of, the nucleic acid sequence of SEQ ID NO:X, and/or the cDNA sequence contained in Clone ID NO:Z. The present invention also provides a polypeptide comprising, or alternatively, consisting of, the polypeptide sequence of SEQ ID NO:Y, a polypeptide encoded by SEQ ID NO:X or a complement thereof, a polypeptide encoded by the cDNA contained in Clone ID NO:Z, and/or the polypeptide sequence encoded by a nucleotide sequence in SEQ ID NO:B as defined in column 6 of Table 1B. Polynucleotides encoding a polypeptide comprising, or alternatively consisting of the polypeptide sequence of SEQ ID NO:Y, a polypeptide encoded by SEQ ID NO:X, a polypeptide encoded by the cDNA contained in Clone ID NO:Z and/or a polypeptide sequence encoded by a nucleotide sequence in SEQ ID NO:B as defined in column 6 of Table 1B are also encompassed by the invention. The present invention further encompasses a polynucleotide comprising, or alternatively consisting of, the complement of the nucleic acid sequence of SEQ ID NO:X, a nucleic acid sequence encoding a polypeptide encoded by the complement of the nucleic acid sequence of SEQ ID NO:X, and/or the cDNA contained in Clone ID NO:Z.

[0070] Moreover, representative examples of polynucleotides of the invention comprise, or alternatively consist of, one, two, three, four, five, six, seven, eight, nine, ten, or more of the sequences delineated in Table 1B column 6, or any combination thereof. Additional, representative examples of polynucleotides of the invention comprise, or alternatively consist of, one, two, three, four, five, six, seven, eight, nine, ten, or more of the complementary strand(s) of the sequences delineated in Table 1B column 6, or any combination thereof. In further embodiments, the above-described polynucleotides of the invention comprise, or alternatively consist of, sequences delineated in Table 1B, column 6, and have a nucleic acid sequence which is different from that of the BAC fragment having the sequence disclosed in SEQ ID NO:B (see Table 1B, column 5). In additional embodiments, the above-described polynucleotides of the invention comprise, or alternatively consist of, sequences delineated in Table 1B, column 6, and have a nucleic acid sequence which is different from that published for the BAC clone identified as BAC ID NO:A (see Table 1B, column 4). In additional embodiments, the above-described polynucleotides of the invention comprise, or alternatively consist of, sequences delineated in Table 1B, column 6, and have a nucleic acid sequence which is different from that contained in the BAC clone identified as BAC ID NO:A (see Table 1B, column 4). Polypeptides encoded by these polynucleotides, other polynucleotides that encode these polypeptides, and antibodies that bind these polypeptides are also encompassed by the invention. Additionally, fragments and variants of the above-described polynucleotides and polypeptides are also encompassed by the invention.

[0071] Further, representative examples of polynucleotides of the invention comprise, or alternatively consist of, one, two, three, four, five, six, seven, eight, nine, ten, or more of the sequences delineated in column 6 of Table 1B which correspond to the same Clone ID NO:Z (see Table 1B, column 1), or any combination thereof. Additional, representative examples of polynucleotides of the invention comprise, or alternatively consist of, one, two, three, four, five, six, seven, eight, nine, ten, or more of the complementary strand(s) of the sequences delineated in column 6 of Table 1B which correspond to the same Clone ID NO:Z (see Table 1B, column 1), or any combination thereof. In further embodiments, the above-described polynucleotides of the invention comprise, or alternatively consist of, sequences delineated in column 6 of Table 1B which correspond to the same Clone ID NO:Z (see Table 1B, column 1) and have a nucleic acid sequence which is different from that of the BAC fragment having the sequence disclosed in SEQ ID NO:B (see Table 1B, column 5). In additional embodiments, the above-described polynucleotides of the invention comprise, or alternatively consist of, sequences delineated in column 6 of Table 1B which correspond to the same Clone ID NO:Z (see Table 1B, column 1) and have a nucleic acid sequence which is different from that published for the BAC clone identified as BAC ID NO:A (see Table 1B, column 4). In additional embodiments, the above-described polynucleotides of the invention comprise, or alternatively consist of, sequences delineated in column 6 of Table 1B which correspond to the same Clone ID NO:Z (see Table 1B, column 1) and have a nucleic acid sequence which is different from that contained in the BAC clone identified as BAC ID NO:A (see Table 1B, column 4). Polypeptides encoded by these polynucleotides, other polynucleotides that encode these polypeptides, and antibodies that bind these polypeptides are also encompassed by the invention. Additionally, fragments and variants of the above-described polynucleotides and polypeptides are also encompassed by the invention.

[0072] Further, representative examples of polynucleotides of the invention comprise, or alternatively consist of, one, two, three, four, five, six, seven, eight, nine, ten, or more of the sequences delineated in column 6 of Table 1B which correspond to the same contig sequence identifer SEQ ID NO:X (see Table 1B, column 2), or any combination thereof. Additional, representative examples of polynucleotides of the invention comprise, or alternatively consist of, one, two, three, four, five, six, seven, eight, nine, ten, or more of the complementary strand(s) of the sequences delineated in column 6 of Table 1 B which correspond to the same contig sequence identifer SEQ ID NO:X (see Table 1B, column 2), or any combination thereof. In further embodiments, the above-described polynucleotides of the invention comprise, or alternatively consist of, sequences delineated in column 6 of Table 1B which correspond to the same contig sequence identifer SEQ ID NO:X (see Table 1B, column 2) and have a nucleic acid sequence which is different from that of the BAC fragment having the sequence disclosed in SEQ ID NO:B (see Table 1B, column 5). In additional embodiments, the above-described polynucleotides of the invention comprise, or alternatively consist of, sequences delineated in column 6 of Table 1B which correspond to the same contig sequence identifer SEQ ID NO:X (see Table 1B, column 2) and have a nucleic acid sequence which is different from that published for the BAC clone identified as BAC ID NO:A (see Table 1B, column 4). In additional embodiments, the above-described polynucleotides of the invention comprise, or alternatively consist of, sequences delineated in column 6 of Table 1B which correspond to the same contig sequence identifer SEQ ID NO:X (see Table 1B, column 2) and have a nucleic acid sequence which is different from that contained in the BAC clone identified as BAC ID NO:A (See Table 1B, column 4). Polypeptides encoded by these polynucleotides, other polynucleotides that encode these polypeptides, and antibodies that bind these polypeptides are also encompassed by the invention. Additionally, fragments and variants of the above-described polynucleotides and polypeptides are also encompassed by the invention.

[0073] Moreover, representative examples of polynucleotides of the invention comprise, or alternatively consist of, one, two, three, four, five, six, seven, eight, nine, ten, or more of the sequences delineated in the same row of Table 1B column 6, or any combination thereof. Additional, representative examples of polynucleotides of the invention comprise, or alternatively consist of, one, two, three, four, five, six, seven, eight, nine, ten, or more of the complementary strand(s) of the sequences delineated in the same row of Table 1B column 6, or any combination thereof. In preferred embodiments, the polynucleotides of the invention comprise, or alternatively consist of, one, two, three, four, five, six, seven, eight, nine, ten, or more of the complementary strand(s) of the sequences delineated in the same row of Table 1B column 6, wherein sequentially delineated sequences in the table (i.e. corresponding to those exons located closest to each other) are directly contiguous in a 5′ to 3′ orientation. In further embodiments, above-described polynucleotides of the invention comprise, or alternatively consist of, sequences delineated in the same row of Table 1B, column 6, and have a nucleic acid sequence which is different from that of the BAC fragment having the sequence disclosed in SEQ ID NO:B (see Table 1B, column 5). In additional embodiments, the above-described polynucleotides of the invention comprise, or alternatively consist of, sequences delineated in the same row of Table 1B, column 6, and have a nucleic acid sequence which is different from that published for the BAC clone identified as BAC ID NO:A (see Table 1B, column 4). In additional embodiments, the above-described polynucleotides of the invention comprise, or alternatively consist of, sequences delineated in the same row of Table 1B, column 6, and have a nucleic acid sequence which is different from that contained in the BAC clone identified as BAC ID NO:A (see Table 1B, column 4). Polypeptides encoded by these polynucleotides, other polynucleotides that encode these polypeptides, and antibodies that bind these polypeptides are also encompassed by the invention.

[0074] In additional specific embodiments, polynucleotides of the invention comprise, or alternatively consist of, one, two, three, four, five, six, seven, eight, nine, ten, or more of the sequences delineated in column 6 of Table 1B, and the polynucleotide sequence of SEQ ID NO:X (e.g., as defined in Table 1B, column 2) or fragments or variants thereof. Polypeptides encoded by these polynucleotides, other polynucleotides that encode these polypeptides, and antibodies that bind these polypeptides are also encompassed by the invention.

[0075] In additional specific embodiments, polynucleotides of the invention comprise, or alternatively consist of, one, two, three, four, five, six, seven, eight, nine, ten, or more of the sequences delineated in column 6 of Table 1B which correspond to the same Clone ID NO:Z (see Table 1B, column 1), and the polynucleotide sequence of SEQ ID NO:X (e.g., as defined in Table 1A or 1B) or fragments or variants thereof. In preferred embodiments, the delineated sequence(s) and polynucleotide sequence of SEQ ID NO:X correspond to the same Clone ID NO:Z. Polypeptides encoded by these polynucleotides, other polynucleotides that encode these polypeptides, and antibodies that bind these polypeptides are also encompassed by the invention.

[0076] In further specific embodiments, polynucleotides of the invention comprise, or alternatively consist of, one, two, three, four, five, six, seven, eight, nine, ten, or more of the sequences delineated in the same row of column 6 of Table 1B, and the polynucleotide sequence of SEQ ID NO:X (e.g., as defined in Table 1A or 1B) or fragments or variants thereof. In preferred embodiments, the delineated sequence(s) and polynucleotide sequence of SEQ ID NO:X correspond to the same row of column 6 of Table 1B. Polypeptides encoded by these polynucleotides, other polynucleotides that encode these polypeptides, and antibodies that bind these polypeptides are also encompassed by the invention.

[0077] In additional specific embodiments, polynucleotides of the invention comprise, or alternatively consist of a polynucleotide sequence in which the 3′ 10 polynucleotides of one of the sequences delineated in column 6 of Table 1B and the 5′ 10 polynucleotides of the sequence of SEQ ID NO:X are directly contiguous. Nucleic acids which hybridize to the complement of these 20 contiguous polynucleotides under stringent hybridization conditions or alternatively, under lower stringency conditions, are also encompassed by the invention. Polypeptides encoded by these polynucleotides and/or nucleic acids, other polynucleotides and/or nucleic acids that encode these polypeptides, and antibodies that bind these polypeptides are also encompassed by the invention. Additionally, fragments and variants of the above-described polynucleotides, nucleic acids, and polypeptides are also encompassed by the invention.

[0078] In additional specific embodiments, polynucleotides of the invention comprise, or alternatively consist of, a polynucleotide sequence in which the 3′ 10 polynucleotides of one of the sequences delineated in column 6 of Table 1B and the 5′ 10 polynucleotides of a fragment or variant of the sequence of SEQ ID NO:X are directly contiguous Nucleic acids which hybridize to the complement of these 20 contiguous polynucleotides under stringent hybridization conditions or alternatively, under lower stringency conditions, are also encompassed by the invention. Polypeptides encoded by these polynucleotides and/or nucleic acids, other polynucleotides and/or nucleic acids encoding these polypeptides, and antibodies that bind these polypeptides are also encompassed by the invention. Additionally, fragments and variants of the above-described polynucleotides, nucleic acids, and polypeptides are also encompassed by the invention.

[0079] In specific embodiments, polynucleotides of the invention comprise, or alternatively consist of, a polynucleotide sequence in which the 3′ 10 polynucleotides of the sequence of SEQ ID NO:X and the 5′ 10 polynucleotides of the sequence of one of the sequences delineated in column 6 of Table 1B are directly contiguous. Nucleic acids which hybridize to the complement of these 20 contiguous polynucleotides under stringent hybridization conditions or alternatively, under lower stringency conditions, are also encompassed by the invention. Polypeptides encoded by these polynucleotides and/or nucleic acids, other polynucleotides and/or nucleic acids encoding these polypeptides, and antibodies that bind these polypeptides are also encompassed by the invention. Additionally, fragments and variants of the above-described polynucleotides, nucleic acids, and polypeptides are also encompassed by the invention.

[0080] In specific embodiments, polynucleotides of the invention comprise, or alternatively consist of, a polynucleotide sequence in which the 3′ 10 polynucleotides of a fragment or variant of the sequence of SEQ ID NO:X and the 5′ 10 polynucleotides of the sequence of one of the sequences delineated in column 6 of Table 1B are directly contiguous. Nucleic acids which hybridize to the complement of these 20 contiguous polynucleotides under stringent hybridization conditions or alternatively, under lower stringency conditions, are also encompassed by the invention. Polypeptides encoded by these polynucleotides and/or nucleic acids, other polynucleotides and/or nucleic acids encoding these polypeptides, and antibodies that bind these polypeptides are also encompassed by the invention. Additionally, fragments and variants of the above-described polynucleotides, nucleic acids, and polypeptides, are also encompassed by the invention.

[0081] In further specific embodiments, polynucleotides of the invention comprise, or alternatively consist of, a polynucleotide sequence in which the 3′ 10 polynucleotides of one of the sequences delineated in column 6 of Table 1B and the 5′ 10 polynucleotides of another sequence in column 6 are directly contiguous. Nucleic acids which hybridize to the complement of these 20 contiguous polynucleotides under stringent hybridization conditions or alternatively, under lower stringency conditions, are also encompassed by the invention. Polypeptides encoded by these polynucleotides and/or nucleic acids, other polynucleotides and/or nucleic acids encoding these polypeptides, and antibodies that bind these polypeptides are also encompassed by the invention. Additionally, fragments and variants of the above-described polynucleotides, nucleic acids, and polypeptides are also encompassed by the invention.

[0082] In specific embodiments, polynucleotides of the invention comprise, or alternatively consist of, a polynucleotide sequence in which the 3′ 10 polynucleotides of one of the sequences delineated in column 6 of Table 1B and the 5′ 10 polynucleotides of another sequence in column 6 corresponding to the same Clone ID NO:Z (see Table 1B, column 1) are directly contiguous. Nucleic acids which hybridize to the complement of these 20 lower stringency conditions, are also encompassed by the invention. Polypeptides encoded by these polynucleotides and/or nucleic acids, other polynucleotides and/or nucleic acids encoding these polypeptides, and antibodies that bind these polypeptides are also encompassed by the invention. Additionally, fragments and variants of the above-described polynucleotides, nucleic acids, and polypeptides are also encompassed by the invention.

[0083] In specific embodiments, polynucleotides of the invention comprise, or alternatively consist of, a polynucleotide sequence in which the 3′ 10 polynucleotides of one sequence in column 6 corresponding to the same contig sequence identifer SEQ ID NO:X (see Table 1B, column 2) are directly contiguous. Nucleic acids which hybridize to the complement of these 20 contiguous polynucleotides under stringent hybridization conditions or alternatively, under lower stringency conditions, are also encompassed by the invention. Polypeptides encoded by these polynucleotides and/or nucleic acids, other polynucleotides and/or nucleic acids encoding these polypeptides, and antibodies that bind these polypeptides are also encompassed by the invention. Additionally, fragments and variants of the above-described polynucleotides, nucleic acids, and polypeptides are also encompassed by the invention.

[0084] In specific embodiments, polynucleotides of the invention comprise, or alternatively consist of a polynucleotide sequence in which the 3′ 10 polynucleotides of one of the sequences delineated in column 6 of Table 1B and the 5′ 10 polynucleotides of another sequence in column 6 corresponding to the same row are directly contiguous. In preferred embodiments, the 3′ 10 polynucleotides of one of the sequences delineated in column 6 of Table 1B is directly contiguous with the 5′ 10 polynucleotides of the next sequential exon delineated in Table 1B, column 6. Nucleic acids which hybridize to the complement of these 20 contiguous polynucleotides under stringent hybridization conditions or alternatively, under lower stringency conditions, are also encompassed by the invention. Polypeptides encoded by these polynucleotides and/or nucleic acids, other polynucleotides and/or nucleic acids encoding these polypeptides, and antibodies that bind these polypeptides are also encompassed by the invention. Additionally, fragments and variants of the above-described polynucleotides, nucleic acids, and polypeptides are also encompassed by the invention.

[0085] Many polynucleotide sequences, such as EST sequences, are publicly available and accessible through sequence databases and may have been publicly available prior to conception of the present invention. Preferably, such related polynucleotides are specifically excluded from the scope of the present invention. Accordingly, for each contig sequence (SEQ ID NO:X) listed in the third column of Table 1A, preferably excluded are one or more polynucleotides comprising a nucleotide sequence described by the general formula of a-b, where a is any integer between 1 and the final nucleotide minus 15 of SEQ ID NO:X, b is an integer of 15 to the final nucleotide of SEQ ID NO:X, where both a and b correspond to the positions of nucleotide residues shown in SEQ ID NO:X, and where b is greater than or equal to a + 14. More specifically, preferably excluded are one or more polynucleotides comprising a nucleotide sequence described by the general formula of a-b, where a and b are integers as defined in columns 4 and 5, respectively, of Table 3. In specific embodiments, the polynucleotides of the invention do not consist of at least one, two, three, four, five, ten, or more of the specific polynucleotide sequences referenced by the Genbank Accession No. as disclosed in column 6 of Table 3 (including for example, published sequence in connection with a particular BAC clone). In further embodiments, preferably excluded from the invention are the specific polynucleotide sequence(s) contained in the clones corresponding to at least one, two, three, four, five, ten, or more of the available material having the accession numbers identified in the sixth column of this Table (including for example, the actual sequence contained in an identified BAC clone). In no way is this listing meant to encompass all of the sequences which may be excluded by the general formula, it is just a representative example. All references available through these accessions are hereby incorporated by reference in their entirety.

TABLE 3

| | SEQ | | | | |
|---|---|---|---|---|---|
| | ID | | EST Disclaimer | | |
| Clone ID | NO: | Contig | Range | Range | |
| NO: Z | X | ID: | of a | of b | Accession #'s |
| HALSC22 | 11 | 503082 | 1-323 | 15-337 | AA358037, AI684486, W19887, AA284345, and AA385699. |
| HALSE71 | 12 | 509638 | 1-133 | 15-147 | |
| HALSG01 | 13 | 500834 | 1-330 | 15-344 | |
| HALSH86 | 14 | 501004 | 1-191 | 15-205 | |
| HALSJ15 | 15 | 501008 | 1-262 | 15-276 | AI432133. |
| HALSL45 | 16 | 723542 | 1-467 | 15-481 | N51075, AA568306, N51117, AA708939, N51516, and AA570794. |
| HALSN27 | 17 | 509759 | 1-306 | 15-320 | |
| HALSN49 | 18 | 971590 | 1-205 | 15-219 | |
| HFLNA59 | 19 | 537447 | 1-305 | 15-319 | AC002302. |
| HFLQA82 | 20 | 757380 | 1-126 | 15-140 | AI075922, AI809982, AI381501, N51297, and AA937353. |
| HFLQF55 | 21 | 719018 | 1-976 | 15-990 | Z43436, H59905, R12032, and D80088. |
| HFLSF55 | 22 | 955305 | 1-388 | 15-402 | |
| HFLSH67 | 23 | 968639 | 1-350 | 15-364 | AI299693, AA883901, AI191830, N55520, AI092823, AI913666, N77006, AI580351, |
| | | | | | AA995222, AA723196, AA885796, AA470715, AI311127, AC002312, AC005800, Z68162, |
| | | | | | AL022326, AB023050, AC007298, AC006006, Z84484, AC007312, AC002544, AC004887, |
| | | | | | AC004972, L78810, AC006965, Z84476, AL021939, AL049709, AP000031, AC008101, |
| | | | | | U91326, Z83844, AC005046, AC006530, AP000362, Z68226, AL117352, AL049869, |
| | | | | | AF124523, AC005225, Z81450, AC007376, AC006057, AC006037, AL050321, AC005082, |
| | | | | | AC002067, AC007617, AB020858, AC005202, AC006387, AC004000, AC007388, AL121756, |
| | | | | | AC005332, AF146367, AL078463, AL079306, AC006271, AC002314, Z83826, AB023048, |
| | | | | | AP000511, AC006029, AP000152, AC000111, AC010200, AP000509, AL034379, AC004087, |
| | | | | | AC005034, AC008038, AC003029, AC002430, AC004987, AL122003, AL031297, AP000313, |
| | | | | | AP000253, AC006013, AC007384, AC004668, AC003013, AC002422, AC004212, AL079342, |
| | | | | | AL031848, AC000385, AL050317, Z93020, AP000050, L78833, AC006991, AC007038, |
| | | | | | AC007731, AC005500, AC005606, AL078580, AL096802, AC003049, AP000117, Z98941, |
| | | | | | AC005363, AC004216, AC008275, AL121871, AC016027, Z83820, AC005722, AL078644, |
| | | | | | AC016830, AC007680, AC006582, AC000048, AC007200, AC004835, AL022146, AC002301, |
| | | | | | AC005538, AC007068, AL035458, AP000213, AC005924, AC002451, AP000135, AC009241, |
| | | | | | AF222685, AC006065, AC007625, AP000512, AL109799, AL049778, AC006502, AC005006, |
| | | | | | AC004168, AL021878, AL035411, AC005539, AP000101, AF130248, AC010197, AL133249, |
| | | | | | AC006459, AC005378, AC010582, AC004197, AL109754, AP000034, AC009405, AC006998, |
| | | | | | AC005392, U73627, AC005076, AC006975, Z82975, AC004549, AC004923, AL035687, |
| | | | | | AC005245, AL035541, AF061779, AL022726, AC008079, AC004823, Z85997, AP000010, |
| | | | | | AC007106, AL031679, AC002064, AL049780, AC005066, AC006480, AL033525, AL031985, |
| | | | | | AC007687, AP000083, AC008170, AC005150, AL049832, AC002487, AL023883, AL137100, |
| | | | | | Z84474, AC004595, Z92547, AL031054, AC005377, Z81365, AC007274, AC005336, |
| | | | | | AF118808, AL122023, AC007632, AC005069, AC009802, and AL050309. |
| HFLSI23 | 24 | 509743 | 1-450 | 15-464 | N63758. |
| HFLSJ61 | 25 | 507017 | 1-304 | 15-318 | |
| HFLSK11 | 26 | 964908 | 1-451 | 15-465 | AC007845, AC016025, and AC016026. |
| HFLSK31 | 27 | 535238 | 1-416 | 15-430 | AI524810, AL031311, AC005288, AF190465, and AC005412. |
| HFLSK81 | 28 | 761133 | 1-401 | 15-415 | H05992, AA525518, AL031584, AC005829, and AC002470. |
| HFLUF43 | 29 | 928026 | 1-840 | 15-854 | AA341707, AA730474, AL035414, AC002365, AC004973, U82695, AL009172, AL031276, |
| | | | | | AC005211, AC005356, U07562, AF001548, AC006211, AL122003, U85195, AL031985, |
| | | | | | AC009516, AF024534, AC005086, AC010170, AC007298, AC007096, AC002119, AL031905, |
| | | | | | and AC004491. |
| HFLUF44 | 30 | 522416 | 1-443 | 15-457 | W89038, AI762449, AI887272, AI924601, AW043702, AI800918, AF015308, and AF068007. |
| HFLUG50 | 31 | 526181 | 1-335 | 15-349 | |
| HFLVE85 | 32 | 531014 | 1-362 | 15-376 | AB007954. |
| HFLVI15 | 33 | 921860 | 1-429 | 15-443 | |
| HFLVJ52 | 34 | 954506 | 1-192 | 15-206 | |
| HFVBA62 | 35 | 754154 | 1-434 | 15-448 | AA343433, AI248396, and AF090901. |
| HFVGI78 | 36 | 935839 | 1-255 | 15-269 | |
| HFVGK74 | 37 | 789130 | 1-264 | 15-278 | |
| HFVHC25 | 38 | 678573 | 1-208 | 15-222 | |
| HFVHE45 | 39 | 572837 | 1-514 | 15-528 | R24654, and AL031680. |
| HFVHE66 | 40 | 572852 | 1-306 | 15-320 | |
| HFVHF81 | 41 | 929124 | 1-291 | 15-305 | AA346826, and T60555. |
| HFVHI01 | 42 | 916970 | 1-403 | 15-417 | |
| HFVHM86 | 43 | 572830 | 1-276 | 15-290 | |
| HFVII33 | 44 | 871980 | 1-365 | 15-379 | |
| HHLBA18 | 45 | 527530 | 1-287 | 15-301 | AA309288, and AA309302. |
| HLDAK38 | 46 | 689904 | 1-445 | 15-459 | |
| HLDBJ86 | 47 | 882365 | 1-440 | 15-454 | AI016020, and AF097518. |
| HLDDI91 | 48 | 790003 | 1-594 | 15-608 | N77737, AA577996, AA678055, and AF209192. |
| HLDOA63 | 49 | 949166 | 1-509 | 15-523 | T46901, and T74588. |
| HLDOB53 | 50 | 728220 | 1-300 | 15-314 | AC005320. |
| HLDOR73 | 51 | 683262 | 1-280 | 15-294 | AA484455, and AF153821. |
| HLDOZ69 | 52 | 697988 | 1-686 | 15-700 | U73330. |
| HLDPA63 | 53 | 744341 | 1-315 | 15-329 | H55681, AI084348, AJ230815, AW270278, AA737444, H61631, AI355513, N41806, |
| | | | | | AA584482, AA584101, N33867, AA555244, T51930, AA150598, H68042, AI272241, H15652, |
| | | | | | AA747377, AA730731, AI521042, AI553670, AA220975, AA515168, AA593419, AW089898, |
| | | | | | AA745189, AA995445, AA179792, T91561, AW245336, AA121391, H61926, AA662700, |
| | | | | | AI302994, T16427, AA182569, AA831714, AA663406, AI354243, AI761862, AA570632, |
| | | | | | AA100540, AI473851, AA662598, AA189069, AI620666, T58367, AA018183, AA502207, |
| | | | | | AW074382, T94070, AI926102, H91844, AI054339, AW302017, AI254779, AA627154, |
| | | | | | AA074342, AI521525, AA613343, AI311779, AI537368, AA814446, AA584603, AW020150, |
| | | | | | AI002931, AI872917, AA302979, AA526514, 1H68186, AW022317, AA338659, AI858864, |
| | | | | | AI871806, AA804866, AW250983, T93989, R72456, N92689, N90460, AA773480, AA077959, |
| | | | | | AL039471, AW118304, AA071132, AA719741, AA557877, AA484237, F17312, AA367745, |
| | | | | | AI540331, AA668133, H75720, AA658268, AA226356, 1126982, AI567873, AA774132, |
| | | | | | AA579031, AA652813, AA559122, AA421889, C15966, AI538075, H91881, AI051656, |
| | | | | | AI521273, AI800204, AA094312, W80952, AA635150, AA668390, 1189643, AA661590, |
| | | | | | AA485630, AA579724, AA047009, AA176257, AA774095, AA702080, AA116106, |
| | | | | | AA663054, AA112646, AW172952, AI791664, H68123, AI611222, AA648683, AA166686, |
| | | | | | AA630173, AA486530, T52557, T40254, AA668670, R87193, AA558716, AI460383, N23637, |
| | | | | | AA848131, AA640797, AI335963, AA702539, F36184, AA595206, AA680247, AA634786, |
| | | | | | AA776899, AA046838, AA876128, AA558402, AA460352, T59416, AA804714, T73597, |
| | | | | | AA161476, AI376097, N83759, AA714754, AL135490, AI270476, AI636587, AA825288, |
| | | | | | AA605201, R42488, N85221, H23431, AA730029, AA831152, H61367, AI623364, AA555241, |
| | | | | | AA526416, AA493808, AW404543, AA833896, AA833875, AI341712, AA551105, |
| | | | | | AA828570, AA600341, AA629540, F07083, AA670132, AA730609, AA196379, C17633, |
| | | | | | AA581263, AA748901, AI679480, AA125781, AA554793, AI922673, AI054395, AW083707, |
| | | | | | AA338262, AA610219, AW304519, AI538252, AI302350, AA600320, N67193, AA829565, |
| | | | | | AI251576, AI306232, AI701959, AI583466, AA845700, AI537931, AA346043, AL120708, |
| | | | | | AA826742, AI453155, AA156323, AA916177, AW328172, AA908329, H94979, AI891143, |
| | | | | | AI367721, AI024339, AI285663, AW439555, AA526326, AA640704, AI246996, AA653983, |
| | | | | | AA219299, AA955035, AA172191, AL045476, AA526625, AA937446, AW074223, |
| | | | | | AA831903, AA135761, T50694, AI078409, AL038475, AL021937, D87022, AC009479, |
| | | | | | Z46936, AC005091, AF045555, AB017652, AC005081, AL109827, AJ011931, AP000315, |
| | | | | | AC006023, AL078613, AF130343, AP000118, AP000165, AP000496, AF196972, AC012380, |
| | | | | | AF049895, U95743, AC003990, AC006538, U82672, AC004838, AL121754, AC004844, |
| | | | | | Z68873, AP000263, AC005274, AL031316, AC004706, AC000404, AP000100, AC004167, |
| | | | | | AC004787, AL109653, Z82204, AC003041, AP000036, AC004226, AC005023, Z82244, |
| | | | | | AL050307, AP000067, AC005406, AC009946, AC005376, AL008715, AC004057, AC003669, |
| | | | | | AL035690, AC004914, AC007103, AP000072, AC007279, AL023876, AC007563, AP000557, |
| | | | | | AF010238, AL021940, AC009263, AL031602, AC004860, AL117338, AC003684, U91321, |
| | | | | | AC004106, AC007684, AJ251973, AC005066, AC004859, AF176915, AC002448, AL031785, |
| | | | | | AC006130, AL022314, AC006973, AP000564, AF043945, AC002524, AL023513, Z99916, |
| | | | | | AL022320, AP000290, AC006013, AC004554, AC006371, AL023913, AL022067, AC004817, |
| | | | | | AL135960, AJ131016, AC002549, AC005516, AL031671, AF123462, AC003093, AB020873, |
| | | | | | AP000346, AC020663, AL031657, AL049553, AL049631, AL050331, AC002492, AP000949, |
| | | | | | AC004020, Y18000, AC006466, AC006480, AC005390, Z83826, AC004945, AE000660, |
| | | | | | AC005017, AC007731, AC002464, AF146367, Z97989, AC005500, AC007317, AC007690, |
| | | | | | AP000688, AC005332, AC006101, AL008635, AL021808, AC005261, AL031075, AL035494, |
| | | | | | AF124730, AC006946, AC006262, AC006230, AC003014, AC006368, AL031073, Z98200, |
| | | | | | AL133163, U82668, AC007559, AC005871, M87915, AC004072, AL133321, AC008056, |
| | | | | | AC007227, AC006455, Z70272, AC002465, AP000023, AC005548, AC005597, Z98304, |
| | | | | | AL022322, AC004092, Z83819, AF006487, AL034548, AL008729, AC005808, AC006008, |
| | | | | | Z82181, U72787, AC002090, AC006476, AC010206, U13369, AC006380, AL078471, |
| | | | | | AC005752, AF027974, AL096707, AL133355, Z84486, Z85996, AC007252, AC005235, |
| | | | | | AC005962, Z98884, AC004047, AC004068, AL008583, AP000884, AC009731, AL078623, |
| | | | | | AC007435, AF121898, AP000078, AF129756, AL133353, AC004985, AC004678, AL078476, |
| | | | | | AC005216, Z92546, AC006486, AL035400, AC002401, AC005998, AC007685, Z82195, |
| | | | | | AL035088, AL035700, AC005694, AC012627, AL034374, AC005488, AC008994, AC002375, |
| | | | | | AJ003147, AL031735, AC005152, AC006080, AF064858, AL022163, Z97054, Z94056, |
| | | | | | AC004843, U82695, AC005410, AL121653, AL008721, AC006502, AL020989, AC004061, |
| | | | | | Z70289, Z92540, AC007857, AC002303, AL034417, AL078472, AF027390, AC007878, |
| | | | | | AP000966, AC007671, AL009172, AC004852, and AC005191. |
| HLDQB65 | 54 | 708002 | 1-437 | 15-451 | AI090052. |
| HLDQH10 | 55 | 932015 | 1-510 | 15-524 | N56664, and AB023136. |
| HLDQQ76 | 56 | 953312 | 1-524 | 15-538 | AI093928, AI439848, T50791, AW449664, T68870, AI623302, AI431307, AI431316, |
| | | | | | AI431238, AI432661, AI432666, AI432655, AI432644, AI431235, AI432657, AI431246, |
| | | | | | AI431350, AI431347, AI432653, AI431323, AI431231, AI431230, AI431257, AI431321, |
| | | | | | AI431318, AI431315, AI431328, AI432654, AI431310, AI431312, AW081103, AI432650, |
| | | | | | AI432677, AL045494, AL042523, AI431247, AI431354, AL042729, AI431353, AI492519, |
| | | | | | AF086735, Y17793, and AF019249. |
| HLDRD54 | 57 | 727954 | 1-251 | 15-265 | AC005668, and AC005233. |
| HLDRE66 | 58 | 966517 | 1-238 | 15-252 | |
| HLDRI94 | 59 | 784582 | 1-384 | 15-398 | AW002504, AI962026, AI955061, AI828858, AA489230, AI203414, AI097549, AI422926, |
| | | | | | AI355971, AW195500, AI423708, AW001625, R07167, and R07166. |
| HLDRQ82 | 60 | 837031 | 1-773 | 15-787 | AI209097, AI073500, AI744810, AI218488, AA312659, AA400307, AA779312, T50792 |
| | | | | | T72192, T69305, T50877, AA401562, AA745947, AI240480, T74831, AI024280, C21015, |
| | | | | | T74746, T72971, and AF064255. |
| HLDRR54 | 61 | 708594 | 1-349 | 15-363 | |
| HLIBO03 | 62 | 923519 | 1-302 | 15-316 | |
| HLIBP66 | 63 | 750608 | 1-219 | 15-233 | |
| HLICR73 | 64 | 837030 | 1-485 | 15-499 | T69381, AI765674, Z20524, AW025169, AI565556, T72971, AL042852, and AF064255. |
| HLICT47 | 65 | 929754 | 1-342 | 15 -356 | |
| HLICT57 | 66 | 734451 | 1-486 | 15-500 | |
| HLPBD66 | 67 | 928708 | 1-516 | 15-530 | AW118937, AI123209, AW001864, AI377932, AI912990, AI805972, AI651420, AI285856, |
| | | | | | AI141443, AI673052, AI221575, AI743946, AI760176, AI754531, AA026012, AI660528, |
| | | | | | AI1949710, H19313, AI249502, AI460280, R77684, AA026000, AA829761, R77685, AI687732, |
| | | | | | AI812062, AA084602, C21025, and AF147395. |
| HUTAF08 | 68 | 958353 | 1-467 | 15-481 | AA977579, AA421364, AA815356, and H95526. |
| HLPBA84 | 69 | 912828 | 1-536 | 15-550 | AI057011, AA634414, AW062302, AA368329, AA507990, AW029626, AI114755, AI888050, |
| | | | | | AA351868, AA454041, AA773560, AL047480, AA015948, AI799421, AI337612, AA315052, |
| | | | | | AW439724, AA368659, F34151, H87756, AI620666, AA101744, F31575, AI298079, |
| | | | | | AA984829, H15241, AL034424, AC006317, Z82176, AL121603, AL132992, Z82195, |
| | | | | | AL096701, AL122020, AL121595, AC006312, AL022165, AL080243, AC006992, Z99716, |
| | | | | | AC007285, AC002554, AC005620, AC007546, AL080316, AL021707, AC008012, AL031655, |
| | | | | | AC004859, AL035458, AL031848, AC005972, AC005399, AC005102, AC006064, Z93017, |
| | | | | | Z86090, AL031295, AL021546, AC004882, AC004671, AC005736, U91321, AL022326, |
| | | | | | Y18000, AL049844, AC007057, AL049872, AP000163, AL031005, U96629, AC002425, |
| | | | | | AC005519, AC005821, AL049709, AC005529, AC002073, AB023048, Z83844, AC004560, |
| | | | | | AL031291, AC005300, AC005049, AL034429, AC004228, AC007204, AL031668, AF205588, |
| | | | | | AC007637, AC005089, AP000692, AC004821, AF111167, AL031733, AC005081, AL096791, |
| | | | | | AC004876, AL035562, AC005484, AC002407, AC002400, AL031904, U91324, Z97630, |
| | | | | | AL031280, AL022328, AL078638, AL078581, AC007388, AL031296, AC005066, AL117258, |
| | | | | | AC005318, Z93023, AC011422, AC006088, AL034451, Z74739, AC006946, AL049776, |
| | | | | | AC004974, AC005280, AL035706, AC003688, AC006255, AF047825, AC000353, U07562, |
| | | | | | AC007487, AC002350, U91323, AL023799, U62317, AL122023, AF001550, AC004973, |
| | | | | | AL031311, AC005271, AL049694, AC005899, AC009399, U80017, X06828, AC005225, |
| | | | | | AL031666, AC005368, AC004638, and AC004770. |
| HLICU57 | 70 | 871716 | 1-780 | 15-794 | AA203741. |
| HLICS57 | 71 | 734450 | 1-282 | 15-296 | AA027810. |
| HLICR28 | 72 | 686132 | 1-377 | 15-391 | W86711, and AA248953. |
| HLICP76 | 73 | 825536 | 1-781 | 15-795 | H14920, N99605, H43830, AW241813, AA992585, H44756, AI800469, N62965, AI375065, |
| | | | | | N92659, H14627, AA897465, AA984538, Z40651, AL133626, and AC010168. |
| HLICO07 | 74 | 952625 | 1-517 | 15-531 | AL133721, AW052162, AI492031, AI640760, AA148591, AW242947, AW294183, and |
| | | | | | AA148722. |
| HLICL82 | 75 | 779576 | 1-492 | 15-506 | W04468. |
| HLICJ60 | 76 | 739746 | 1-442 | 15-456 | AA700817, T89766, AI248274, W90390, AA846955, W88458, T89405, AI023455, and |
| | | | | | AI023461. |
| HLIBZ10 | 77 | 963973 | 1-325 | 15-339 | R91346. |
| HLIBK17 | 78 | 662438 | 1-478 | 15-492 | R15403. |
| HLIBB54 | 79 | 782180 | 1-283 | 15-297 | N93782, AA430461, AA190961, and AA134507. |
| HLDRT92 | 80 | 791215 | 1-482 | 15-496 | AA432137, T90468, and R02051. |
| HLDRP58 | 81 | 735731 | 1-620 | 15-634 | AA064968, and T82701. |
| HLDQV07 | 82 | 952691 | 1-439 | 15-453 | R13965, and Z42716. |
| HLDQN90 | 83 | 857062 | 1-149 | 15-163 | AA441872, and AL022323. |
| HLDQH68 | 84 | 835571 | 1-578 | 15-592 | AA179351, and AC002352. |
| HLDQD92 | 85 | 552019 | 1-658 | 15-672 | H75477, H79155, AC004872, AC004562, and AC005144. |
| HLDQC57 | 86 | 734475 | 1-797 | 15-811 | AA429570, and AA429701. |
| HLDPE31 | 87 | 697969 | 1-464 | 15-478 | AA034053, AI085454, T91887, AI468274, and H78608. |
| HLDOX46 | 88 | 719023 | 1-470 | 15-484 | R87345, AA081495, H43858, and AF038458. |
| HLDOT85 | 89 | 784331 | 1-818 | 15-832 | R18596. |
| HLDOS76 | 90 | 770016 | 1-448 | 15-462 | T69062, AA706202, AA984829, AA557945, F31811, AA371410, AI636734, D51877, |
| | | | | | AW089950, AA687542, AA663074, AA385775, AI439676, AI678476, AL039309, W63553, |
| | | | | | AA244181, AA714073, AI591134, AW079667, AW392414, AI368732, AW302670, |
| | | | | | AL042630, AA135988, AI343669, AI049504, AI309121, AA559890, AA595504, AA577141, |
| | | | | | D51809, AI207476, AI885465, AA302971, AW019964, AA523833, AA077619, AL039930, |
| | | | | | AI627168, AW272640, AW190277, AW193337, AF047825, AL049872, AP000501, |
| | | | | | AC007057, AC005899, AL049869, AC007201, AC002477, 134294, AC006581, AC002128, |
| | | | | | M87889, AC005231, AC004242, AF031078, AC005412, AF030876, AL121652, AP000557, |
| | | | | | AC005736, AL020995, AL049795, AP000065, AC004967, AC007308, AC002470, AC004257, |
| | | | | | AL135744, AL022313, AC000090, AL022721, AD000092, AC005919, AP000210, AP000132, |
| | | | | | Z97630, E15649, AC006450, AL022326, AC002546, AL117330, AL021453, AC007225, |
| | | | | | AC004938, AP001053, AL096766, AC003685, AC000075, AL031846, AL022323, AC007182, |
| | | | | | Z94801, AC003109, AC005486, E15653, AL022165, AC005667, Z81357, AL020989, |
| | | | | | AL031257, AL049748, AP000295, AC006088, U95739, AL133244, AL050333, AC004217, |
| | | | | | AC007227, AC006449, AD000813, AC002543, AC005694, AL022316, AC004185, U51561, |
| | | | | | AL049713, AF039904, AC018633, AL008730, AC005880, AC005670, AL139054, AP000497, |
| | | | | | AC005409, AF064861, AC002350, AL050318, AC006537, AC005261, AC004893, AC005046, |
| | | | | | Z83844, AC005884, AL109758, AC004150, AC007376, AC005332, AC004491, Z85987, |
| | | | | | AL031005, AC004801, AC005180, AL022320, AC004263, AL080243, AC004686, AC007546, |
| | | | | | AC005796, AF029308, AL133353, AL049576, AC004126, AC004836, AC010582, AC004526, |
| | | | | | AC005859, AP000044, AC002375, AC005664, AC007066, AC002310, AC004913, AC005544, |
| | | | | | AC004983, AC006928, AL034548, AL022311, AC008119, AC005971, AC000084, Z97054, |
| | | | | | AC004585, AC004000, AC003104, AL021578, AF196971, AC005527, AC004814, AC006547, |
| | | | | | AC004955, AF108083, AP000116, AL132826, AL021918, AC005821, AC006064, Z94161, |
| | | | | | AF134726, Z93241, U96629, Z94277, AP000509, AF196969, AC006430, AC006023, |
| | | | | | AC002425, AL050321, AC007686, Z49235, AC006084, AC005041, AC004966, AC004383, |
| | | | | | AL031293, AL031680, AL031255, AC007363, AC006160, AC004883, AC005484, AL133246, |
| | | | | | AP000553, AC005778, AL031277, AC005274, M63544, Z93017, AL079342, AC003029, |
| | | | | | AC006388, AC005529, AC004703, AP000558, U80460, AF196970, AC005620, AC005920, |
| | | | | | AC007263, AC002996, AC002491, Z93023, L78810, AL031650, AL049694, AL109613, |
| | | | | | AL035086, AC004844, AL109939, AC008085, AL024474, Z95115, AC005081, AC005229, |
| | | | | | AC000134, U91326, U85195, AC005768, AP000112, U10087, AC005666, AC006387, and |
| | | | | | Z98941. |
| HLDOM43 | 91 | 715254 | 1-536 | 15-550 | H57686, AW328038, AW328039, AI681235, H67403, AL039390, AI249936, AI890907, |
| | | | | | AL042551, AL045166, AL046681, AI273179, AW152182, AL046137, AI633125, AI431315, |
| | | | | | AI915291, AI538564, AI884318, AI701097, AI499570, AI333104, AI364167, AI358271, |
| | | | | | AI888022, AI637584, AI499463, AI866484, AI302590, AI401697, AI638644, AI653979, |
| | | | | | AI687944, AA806719, AI702073, AI932620, AI580190, AI473536, AI818240, AI670002, |
| | | | | | AI433157, AI247293, T69241, AI499478, AW190194, AI689247, AW081133, AW167228, |
| | | | | | AW004606, AI432644, AI474646, AI694157, AI623302, AI635016, AW075667, AI654276, |
| | | | | | R40363, AI431307, AW167021, AI431316, AI698391, AI474699, AI431238, AW148408, |
| | | | | | N21402, AI687362, AI889189, AI677796, AI924051, AI453229, AI419826, AI955221, |
| | | | | | AI362495, AI926790, AI370623, AI872315, AI866786, AL046466, AI354998, AI963346, |
| | | | | | AI683563, AI819326, AI357940, AI564719, AI469425, AI362248, AI142101, AI610690, |
| | | | | | AI619502, AI366900, AI568293, AW105296, AI635634, AI349482, AI921464, AI654286, |
| | | | | | AI827154, AI625079, AI798359, AA019328, AI682915, AI890833, AI499512, AW104724, |
| | | | | | AW131294, AI539849, AW104827, AW029638, AI440260, AI537677, AW075381, AI591387, |
| | | | | | AI494201, AI804505, AI500659, AI815239, AI266643, AW151893, AI569975, AI866465, |
| | | | | | AI815232, AI866691, AI801325, AI500523, AI538850, AI633000, AW008226, AI887775, |
| | | | | | AI582932, AW090550, AI672187, AI590043, AI872423, AI923989, AI284517, AI579901, |
| | | | | | AI469112, AI500706, AI491776, AI445237, AW193530, AW073270, AI687588, AI338876, |
| | | | | | AI289791, AI926593, AW151138, AI521560, AI587114, AI682971, AI500662, AW151974, |
| | | | | | AI285417, AI469532, AI539800, AI582912, AW172723, AI284509, AI648509, AI538885, |
| | | | | | AI889168, AI440263, AI927233, AI866573, AW058275, AI934259, AL043166, AI633493, |
| | | | | | AW087207, AA836471, AI434256, AI866469, AI805769, AI434242, AI445025, AI888661, |
| | | | | | AW198090, AI500714, AI284513, AI591075, AW087866, AI888118, AI285439, AI871697, |
| | | | | | AA806720, AI859991, AI436429, AI355779, AI889147, AI623736, AI581033, AI371228, |
| | | | | | AI432030, AI687127, AI491710, AI440252, AW148363, AI670009, AI440238, AW129722, |
| | | | | | AI567971, AI635287, AI702331, AI860003, AI610557, AI242736, and AI367680. |
| HLDOK25 | 92 | 678063 | 1-528 | 15-542 | C75377, AA527038, H93171, AA862312, AA846923, AI636734, AI368862, AA302978, |
| | | | | | AA809186, AW023111, AA297443, AA599080, AA568127, AA632765, AA938390, |
| | | | | | AW007424, AL138199, AI340858, AI824541, AW192402, AA548610, AI356440, AI583936, |
| | | | | | AL118925, AI471467, AI362442, AA629888, AI751753, AA630122, AA808982, AA502207, |
| | | | | | AC004912, 134294, AC018633, AC005800, AC005207, AC005484, AC005837, AC006388, |
| | | | | | L44140, AC005736, AF205588, AL132712, AC005887, AL020997, AF196779, AF095901, |
| | | | | | AC005666, AL133163, AC005740, AC005365, U62292, AL034420, AL049776, AL031289, |
| | | | | | AC000353, AL080317, AL031255, AL049843, AC005759, AC005940, Z82176, AL049539, |
| | | | | | AC004876, AL035671, AC005914, AC005225, AL035417, AC007216, AC004703, AC007312, |
| | | | | | AC004644, U78027, AC009721, AC002996, AC006130, AC008101, AF003626, AC004938, |
| | | | | | AC002119, AC005043, AC020663, Z95152, AL117351, Z85986, AL033527, AC005519, |
| | | | | | AC007845, AC004890, AC005412, AL035422, AC006953, AC016027, AL022311, AL031055, |
| | | | | | AP000556, AC004477, AP000557, AC005747, AF001552, AC002425, AP000552, AC016830, |
| | | | | | AC004647, AC007371, AC009516, AL109758, AL117337, AC003035, AC005808, AL031311, |
| | | | | | AC004466, AC003025, AC016026, AC003029, AP000048, AC004491, AF126403, AC004253, |
| | | | | | AF001548, AC004815, AL035400, AC004685, AL137403, AF139813, AC005920, Z97196, |
| | | | | | AL049713, AF165926, AC005231, U95742, AC005255, AC005378, AL008582, AL133245, |
| | | | | | AL049757, AC005971, AP000501, U91321, AL049576, AC005839, AF111169, Y15724, |
| | | | | | AL096701, AC002483, AC005585, AC004832, AL135744, AC004228, AL050318, AC004650, |
| | | | | | U63721, AC004893, AL022721, AL049872, AC004263, AC007193, AC002310, Z84487, |
| | | | | | AC005300, AC005288, AC004908, AB011168, AC004796, AC004985, AC006064, AL035249, |
| | | | | | AC004656, AL049540, AL031277, AC007676, AC005779, Z98051, AF196969, AC005722, |
| | | | | | AL136295, AL031670, AC005531, AL031295, AC002477, AL035659, AC004895, Z98304, |
| | | | | | AC005844, AL031848, AC006270, AC006441, Z84480, AC005912, AC004805, AC000041, |
| | | | | | U91323, AC007860, AL133312, AC004891, AL031133, AC002544, AF001550, AC007182, |
| | | | | | AL034553, AC008115, AC005088, Y10196, AC006347, AL109827, AC004150, AF064861, |
| | | | | | Z94056, AC005778, AF196970, AC002558, L34635, AL049874, AC004967, AC004883, |
| | | | | | Z97630, AC004953, AC000159, AL021978, AR036572, U91328, Z86090, Z93241, AF053356, |
| | | | | | AC005082, AL109980, AC006236, AB026898, AP000099, AC005069, AC005409, AF196971, |
| | | | | | and AC007993. |
| HLDOE06 | 93 | 922162 | 1-524 | 15-538 | AA866169, AA446868, AA505738, AI055812, AI887206, AI923981, AW084907, AA485906, |
| | | | | | AA037428, AA443821, AI680166, AW361703, AI439919, AI689153, AA622493, AI476741, |
| | | | | | AW361713, AI365655, AA586973, AA772452, AA923558, AI565628, AI304714, AI244508, |
| | | | | | AA099053, AA554338, AA857533, AI300683, AW293561, AW149707, AI186551, D25678, |
| | | | | | T69023, AI682452, AI265996, AA037532, H49206, AW361850, AA902603, AI538000, |
| | | | | | AA142864, AA725579, D52941, AI630692, AW026668, F32568, AW293557, AI073910, |
| | | | | | AAI36784, C15445, W15588, AA028909, AI370704, T82843, AW361878, AA043415, |
| | | | | | T30817, AA845713, AA594615, AW340363, AW242261, AA877034, AI309555, AW075588, |
| | | | | | AI828409, AA558035, AW148338, AI285135, H03187, AA534866, R27376, AA331136, |
| | | | | | AA847452, T31464, AA136668, R31732, T36021, AA370723, W24128, AI024538, AA953603, |
| | | | | | D80641, D61001, R81710, AA452178, AW118866, AA098897, AA876501, AW274233, |
| | | | | | AI932889, T60260, AI140225, AI041191, AI806267, AA425294, R27377, AA693413, |
| | | | | | AA446982, AA507290, AI932451, R24642, AA424069, AI133679, R56822, AI914460, |
| | | | | | AI826456, W31664, AA360213, AA486511, T61641, AW129345, AA506474, and AA946889. |
| HLDOD83 | 94 | 724046 | 1-648 | 15-662 | AA781412, AA719282, AA706936, N58009, AI095639, AI636021, AI188542, N64210, |
| | | | | | AA781918, AA706954, H48268, AI695180, AI198594, AI474680, AI244280, N54516, T67631, |
| | | | | | AI927296, W00987, H48358, AW194801, N57934, AA970232, AW102737, N74650, |
| | | | | | AA843702, N76219, AW024654, T67512, N76440, AA885957, AW001061, T70355, |
| | | | | | AF169017, U91541, AP001101, L16507, and AL109817. |
| HLDOC67 | 95 | 689240 | 1-442 | 15-456 | H68576, AA232811, AA256904, AA046229, AA135267, AA359782, H46783, H41887, |
| | | | | | AI922726, AA027883, AW248488, and AI972277. |
| HLDNR75 | 96 | 767294 | 1-356 | 15-370 | H58931. |
| HLDNR54 | 97 | 729853 | 1-343 | 15-357 | AI948492, and AC002401. |
| HLDNL92 | 98 | 792694 | 1-387 | 15-401 | R06001. |
| HLDNL57 | 99 | 963552 | 1-657 | 15-671 | AA043317, AA058606, AI872402, AA527086, AA532449, AI524324, AA514662, AA043318, |
| | | | | | AA659799, AI636322, AA470758, AA971274, T61144, T52957, AI865691, AA861977, |
| | | | | | AI022054, AI209021, AA602448, AA640580, and AI055999. |
| HLDDY07 | 100 | 952751 | 1-682 | 15-696 | H93481, and AL033397. |
| HLDDS06 | 101 | 934929 | 1-541 | 15-555 | AI206213, AI918833, and Z94865. |
| HLDCW15 | 102 | 705466 | 1-577 | 15-591 | R89288, H72622, H47983, and R00532. |
| HLDCU74 | 103 | 765307 | 1-227 | 15-241 | AI682666, AW139277, AI338770, AI761828, R50463, and Z69719. |
| HLDCE01 | 104 | 916444 | 1-295 | 15-309 | AA994155, AA628622, and AL049742. |
| HLDBW64 | 105 | 746545 | 1-495 | 15-509 | H49820, AI015194, AA885084, AW294420, AL045755, and AL046210. |
| HLDBV65 | 106 | 764915 | 1-448 | 15-462 | W61047, AI905432, AI905450, AA147405, AA469989, AW176008, AI816821, AA425819, |
| | | | | | AI905502, AA309139, H19938, AA443501, AW301071, AA460750, AW003882, AA029238, |
| | | | | | AW369505, AA040824, AW003283, AW393141, AF059617, U85755, and M96163. |
| HLDBT71 | 107 | 760347 | 1-684 | 15-698 | N52837, AA488637, AI885757, AA005131, AI241473, AW292454, AA705676, H57758, |
| | | | | | AA134965, AA135046, H56907, AA486018, AF144233, and AL031666. |
| HLDBN55 | 108 | 731734 | 1-585 | 15-599 | AW250883, AI538703, AA133554, AA635020, AW246754, AW246544, AI693985, AI830799, |
| | | | | | AI371038, AI302734, AA515421, AA594483, AI761866, AI703350, AI336388, AI817132, |
| | | | | | AA932660, AA469087, AI809399, AI702168, AA987492, AI682236, AA953756, AA514434, |
| | | | | | AI342818, AF176110, AF147787, AB028021, Z57610, Z60048, L10409, U04197, X74937, |
| | | | | | L09647, Z57611, and Z57609. |
| HLDBN38 | 109 | 678424 | 1-772 | 15-786 | R37780, Z40536, F02088, AC007567, and AF172277. |
| HLDBN03 | 110 | 924100 | 1-843 | 15-857 | AI278279, R56805, T99445, R54310, R13679, and R35831. |
| HLDBI09 | 111 | 625542 | 1-463 | 15-477 | W86312. |
| HLDBE09 | 112 | 625554 | 1-449 | 15-463 | AI679782, AI963720, AL046409, AI284640, AA490183, AI270117, AW193265, AI334443, |
| | | | | | AI345654, AI613280, AI281881, AI064864, AW303196, AA720702, AW274349, AL042853, |
| | | | | | AW301350, AW249224, AL119691, AW419262, AA521399, AA610491, AA521323, |
| | | | | | AL138455, AI589230, AI801482, AI570261, AA828704, AA551503, AA877817, AL048626, |
| | | | | | F36273, AW021583, AA491284, AI567076, AA468022, AW265393, AI623720, AI421841, |
| | | | | | AI499938, AL044858, AI754658, AW072923, AW406755, AL041690, AA679514, AL044940, |
| | | | | | AI350211, AA522942, AA503015, AI431303, AI457397, AA491814, AI499503, AI696962, |
| | | | | | AI345681, AI345675, AW265385, AW407578, AI355206, AW073470, AW020340, |
| | | | | | AW238278, AI254615, AI133164, AI358229, AA526787, AI270559, AA164251, AW265170, |
| | | | | | AA584201, AA569471, N53150, AA581903, AW088202, AL039958, AW270382, AW270270, |
| | | | | | AL038705, AW029038, AI890918, AI251436, AI357901, AA587604, AI610920, AW304584, |
| | | | | | AA682912, N48230, AI805607, AW162049, AW438643, AW327868, AA219129, AI929531, |
| | | | | | AW062724, AI732865, AI339850, AA587256, AI625244, AI473943, AI919265, AI962050, |
| | | | | | AI110770, AA523815, AW340844, AL038785, AA491831, AL038474, AA493471, AA483223, |
| | | | | | AI537506, AI368745, AL119984, AI918421, AW028429, AI053672, AI890348, C06327, |
| | | | | | AL046205, AI799642, AI888518, C05755, AI307201, AW301809, AL042420, AI365988, |
| | | | | | AA623002, AA507824, AA244357, AA523821, AI619997, AW408717, AA908687, AI368256, |
| | | | | | AI246119, AA577906, AA493708, AA129446, H71429, AL046457, AW020992, AA665330, |
| | | | | | AI567674, AI610159, AA806796, AW238583, AI801600, AL043009, AW274346, AA470969, |
| | | | | | R24887, AI951863, AA630362, AI860020, AW376931, AI305547, AI249997, AI345518, |
| | | | | | AI289067, AI379719, AI061334, AW163293, AI633025, AI471481, AA598425, AI375710, |
| | | | | | AA713815, AA515829, AI344844, AA683258, AW166815, AI278997, AA582911, AI434706, |
| | | | | | AI732786, AW193432, AL121235, AA584145, AI688846, AI471572, AA765170, AI653636, |
| | | | | | AW261871, AW080134, AW083402, AL138265, AI890923, AI469968, AW104748, |
| | | | | | AL043719, AA594725, AA780515, AI340453, AI679132, AI341664, AA613203, AI654247, |
| | | | | | AA653618, AW302013, AI538852, AW276827, AA101689, AW169151, AA613227, |
| | | | | | AI049722, AI561060, AA469451, AA723017, AL042753, AW088616, AI251002, AL120687, |
| | | | | | W79504, AA837084, AI890928, AA553666, AA599920, AA525190, AI358571, AA610493, |
| | | | | | AA559290, AA523837, AI357288, AC005280, AC005484, AC004263, AL031005, AL031123, |
| | | | | | U62317, AC005755, AC002549, AF109907, AC004087, AB023049, AL109753, AC004858, |
| | | | | | AL035415, AL117352, AL096774, AL096791, AC006285, AC005234, Z83840, AC006430, |
| | | | | | AP000114, AP000046, AC007637, AC006205, AC003007, AP001172, AE000658, AC003006, |
| | | | | | AC005940, AL035658, AJ010770, AL133448, AL031729, AC005771, AP000348, AP001054, |
| | | | | | AC005288, AC005072, AJ003147, AL021368, AC009516, AC005632, AC016831, AL109758, |
| | | | | | AL031651, AP000555, AL121653, AP000553, AC008079, AL031681, AC005837, U95740, |
| | | | | | AP000557, AL023807, U80017, AC007358, AL022237, AC004941, AC007263, Z99758, |
| | | | | | AC005011, AC007308, U85195, U07000, AC004862, AL022721, AC002470, AC004675, |
| | | | | | AC007227, AC005257, AF042090, AC003101, Z98257, AC008372, AL050341, AC006449, |
| | | | | | Z99716, AC003684, AC007450, U91321, AC005785, AF196971, AL139054, AL008725, |
| | | | | | AL031276, AC009405, AP000117, AL023284, AF088219, AL035587, AC006001, AL096776, |
| | | | | | AC018633, ALO31121, AC005622, Z93241, AL050318, AC005488, AP000359, AC007216, |
| | | | | | AC004491, U62293, AC005971, AP000689, AC005520, AC006998, AC007488, AL121652, |
| | | | | | AC006137, AL050347, AL034420, AL109798, AC005074, AC002525, AC006960, AL021977, |
| | | | | | AC006019, AL022323, AC002429, AC002350, AL049869, AC006011, AC005089, AC006040, |
| | | | | | AC003074, AC005295, AC005324, AC006213, AC006581, AC006487, AL021808, AL121658, |
| | | | | | AC016025, AL008629, AC004987, AC005015, AL031295, AC005881, AC005250, Z69917, |
| | | | | | AC005531, AC006270, AC004002, Z93930, AC004638, AL096707, AC002425, AC003691, |
| | | | | | AC002430, AC006277, AC005104, Z98742, Z74739, AC005261, AC006251, Z98051, |
| | | | | | AC005060, Z73988, AC002045, AL033543, Z98200, AC007151, AL022322, AC007384, |
| | | | | | AL035450, AL031427, AF015151, L77570, AL034452, AC005191, AC004815, AL021393, |
| | | | | | AC006312, AC004492, AC007666, AC006002, U95742, AC007565, D87675, D83989, |
| | | | | | AL033525, AC004650, AC007225, AC006344, AL121603, AL133245, AC007510, AL023575, |
| | | | | | AC004016, AL021453, AF077058, AL049569, AL049759, AL035079, AC004526, AC004848, |
| | | | | | AC007387, AL049766, AC007685, AC004841, AC005821, AF015149, U57007, AC004796, |
| | | | | | AJ246003, AL035361, AC002365, AL035071, AC003119, AC002381, AC005768, AC005682, |
| | | | | | AL078477, AC006130, AC005585, AC002563, X54180, U18391, U18392, U18394, X55925, |
| | | | | | U57005, AC004686, AC005553, AL022302, AC002096, AC005541, AF190465, AC005778, |
| | | | | | AC005071, AL021707, AF045555, AC006026, AC007993, AL049697, AC007676, AC005291, |
| | | | | | AC005004, AC004967, U18393, AC006256, AC002347, AJ229041, AC003086, U91326, |
| | | | | | AL020995, AL096701, AL133249, and AC007245. |
| HLDBD09 | 113 | 625551 | 1-454 | 15-468 | AC005390. |
| HLDBD02 | 114 | 920039 | 1-429 | 15-443 | AI610448, N50597, AI708290, AI769304, W38693, AA236802, W20094, AI871973, |
| | | | | | AA299214, R87631, AI935619, AL050159, AC007546, AL022316, AC005829, AC005736, |
| | | | | | AC005800, AC005049, AC007151, AC004195, AL023575, AL109984, Z99128, and |
| | | | | | AC005921. |
| HLDBC10 | 115 | 964582 | 1-453 | 15-467 | D59341, and AP000962. |
| HLDBB21 | 116 | 713680 | 1-451 | 15-465 | AI608719, AI081552, AI278617, AI609398, AA621655, AA421224, AI290739, AA421214, |
| | | | | | AA868455, AW193527, AA868840, AW009516, AW001133, AI689150, AA610770, |
| | | | | | AI376946, AI735188, AI567964, AI284299, AI022091, AA993670, AA911941, AA888156, |
| | | | | | AI754809, AI273254, AA873585, AI743002, AW009876, AA602889, N40529, AA947889, |
| | | | | | R69521, AI277633, AA488241, AA460139, AA425965, AA579086, AI241348, AI300301, |
| | | | | | AA612762, AA421945, AA843194, T70058, AI190110, AA449898, AA581663, AI026923, |
| | | | | | AI090471, AA550844, AI471315, AA622170, AW250846, AA410582, AI301856, AA402945, |
| | | | | | AI350362, AA468762, AI080736, AA443534, AI268605, AW245161, AW406807, AA078825, |
| | | | | | AA449842, AA989498, AA662376, AA857872, AW402201, AA683333, AW403534, |
| | | | | | AA993166, AA429053, AA847314, AI753847, AA468742, AA468553, AA421946, W94599, |
| | | | | | AA602504, AA830904, AI018058, AA830858, N90006, AI880407, N63003, H23088, |
| | | | | | AA076631, AA155589, AA216765, W95828, AI269128, AA429082, AA476292, F36072, |
| | | | | | AA864547, AA086337, AA351368, AA258525, T34731, AA693504, AI872357, R87220, |
| | | | | | AA857088, AI160438, AA587426, N79911, AA364554, H14233, H30244, AA099847, |
| | | | | | AA837812, AA455853, AI364726, F37916, AA654151, H87247, AA335313, R87285, |
| | | | | | AA405877, R84553, AA349834, H30633, F00281, N31446, F09159, AI879829, T36108, |
| | | | | | AA758410, AI688327, H96271, W00489, H87295, Z28833, T74871, AW014579, AA405186, |
| | | | | | AI005580, AA844795, R87446, F34288, W05255, AW152260, W19804, AW250093, M62217, |
| | | | | | R45183, R20760, AA665325, AA078793, F36790, AA887570, AA365385, AA243274, |
| | | | | | AA429249, AI343791, F32088, Z41560, AW247954, AI244591, AA778048, AA988319, |
| | | | | | AA773338, AA991819, AA379651, AA460736, D54442, F02045, AA382483, AA365451, |
| | | | | | AA280940, AI474244, N98909, AL037768, AA642283, N53896, AA316956, AI524279, |
| | | | | | AA085173, AI581582, AA974346, AA911791, AI973107, AA983218, AI417506, H49168, |
| | | | | | R85162, AA384134, D20373, AW059596, AA055276, L38995, S75463, X84694, L38996, and |
| | | | | | Y11796. |
| HLDBB08 | 117 | 959385 | 1-188 | 15-202 | |
| HLDAV58 | 118 | 736027 | 1-468 | 15-482 | C04863, N53185, N54200, and N54238. |
| HLDAV38 | 119 | 709140 | 1-453 | 15-467 | T39217, F07212, AI299882, AI309979, AA804297, AA729512, AI918419, AA809635, |
| | | | | | AA650447, AA620510, AL037714, AW162750, AL118925, AA570441, AA715955, |
| | | | | | AL046830, AA525293, AA508036, AW102811, AA582746, AA654482, AA370742, T85570, |
| | | | | | AW263867, AA158549, N22506, AI192440, AA937809, R70883, AA074351, AA581247, |
| | | | | | AA133332, W72660, AA719523, D51809, AA627276, AA516214, AA502207, AI298079, |
| | | | | | AA938390, AI492776, H85808, AI273148, C14480, AL041013, AA515728, AA678845, |
| | | | | | AW162227, AA551268, AA312559, AI732635, AI732128, AL040430, AA728938, AA612578, |
| | | | | | AW265342, T48856, AA452887, AA911582, H68110, T11709, AI929796, AI799421, |
| | | | | | AA713724, AA282951, C17794, AI858889, AA806804, AA071045, AW022891, AA629866, |
| | | | | | R70884, AA346436, AI969639, AI753536, R93642, AI433503, AI446561, AL134167, |
| | | | | | AA634926, AI912401, AI198718, H09267, AI819391, AI049955,N23241, AA381150, |
| | | | | | AA320105, F26713, AA528496, AA092704, AA586433, AW407889, AA554257, H79586, |
| | | | | | AI866377, AA385775, AA091982, R83068, AI669421, AA315361, AA229422, H73306, |
| | | | | | AA936718, AI915081, H43183, AI479068, AA297490, AW023111, R93235, AW440451, |
| | | | | | AA632556, AI800426, AA715968, W96522, H67064, AI683514, AW340912, AA635413, |
| | | | | | AI274011, AA588611, AL079734, AW247389, H58354, AA225890, F31575, AA226085, |
| | | | | | AI800345, F33505, AA486877, H69966, AA084609, R96175, AI282629, AA757753, |
| | | | | | AI671077, H64715, W01359, H87756, AI580906, AA993138, R42733, H59878, AW166920, |
| | | | | | AA188940, AI963029, AA594591, AI609972, T55459, H63660, H59886, AA878407, |
| | | | | | AI302156, AW192373, AA303059, AA644090, AA581404, AW166925, AA527877, AI885060, |
| | | | | | AW272599, R96427, AI963679, F26801, AI056046, AL119247, AI003503, AA737114, |
| | | | | | AA809153, AA728880, AA558404, N64439, AL041895, AA595554, AA837771, H66519, |
| | | | | | AL048002, AA296603, AA640825, AA302690, AA610255, AI914713, AA332013, AA528566, |
| | | | | | AA583245, AA603264, AI810584, AA445908, H71659, AA371410, AA838091, AI589403, |
| | | | | | AI051488, AI821805, AA714524, N92813, AA653955, AI306717, AI821056, R08161, |
| | | | | | AA854460, AI078409, AA808861, AI066711, AI242502, AI866970, N86362, AI792092, |
| | | | | | T94988, AI567391, AA441987, R95090, AA604797, AC004876, AL031286, AC002302, |
| | | | | | AL121769, AL035090, AC000116, AC005335, AC002511, Z84483, AC003091, AC004770, |
| | | | | | AC004228, X66029, AL031602, AL034420, AL024507, AC007637, AL021939, U17576, |
| | | | | | L81693, AC005755, AL109627, AC000378, AP000553, AC003982, Z96776, U02052, |
| | | | | | AC005399, AL049631, AE000662, X95586, Z70288, AP000700, AP000701, AC005156, |
| | | | | | AC007199, AL049650, AL033530, AF051976, AL049538, AL109827, AL022313, AF207550, |
| | | | | | AC002563, AL035423, AC007388, AL049712, AC006479, AL033527, AL096701, AC010183, |
| | | | | | AL031283, AL049569, AC008062, AR036572, U91328, AL096757, AL008726, AL031670, |
| | | | | | Z95115, AC008273, AL078638, AC005229, U96629, AC003013, AL049873, AL034429, |
| | | | | | M87889, AC006487, AB001523, AL035685, AC007308, AL079340, AC006441, L78810, |
| | | | | | AF024534, AC004257, AL049856, AF024533, AF003626, AC005911, AL033517, AC002551, |
| | | | | | AP001065, AL031767, AC005086, AC006965, AC004966, AC004477, Z84484, AC008033, |
| | | | | | AC004616, AL024509, AC006285, AC006356, AC003669, Z82194, AC007278, U91318, |
| | | | | | AC016025, AL021368, AL008718, AL049776, AC007786, AL031311, AC005859, AF109907, |
| | | | | | AC004019, 189273, AF086372, AC003100, S42653, AC007878, AC009946, Z72519, |
| | | | | | AP000322, Z68288, Z70280, AC005256, Z68284, U51561, AC004699, AP000303, AL049549, |
| | | | | | AC004851, AC004656, AP000226, AL133382, AC005376, AC006130, AF001552, AC004924, |
| | | | | | AC004254, AL096704, AC004975, Z99127, AP000053, AP000121, AP000168, AP000046, |
| | | | | | AP000114, AP000087, AC004522, AL050341, AC006979, AC005004, AL031622, AL021155, |
| | | | | | AC007129, AL034379, AC003954, AC002477, Z84466, AL080250, AC005244, AC004241, |
| | | | | | AC005099, AC004909, AC002300, AC004590, AC004595, AC004843, AL035422, AC005280, |
| | | | | | AL049696, AL049636, AL032821, AC006501, AF093117, AJ006995, AC006020, AC005666, |
| | | | | | AC004821, AC007371, AC005695, AC006257, AC006042, AC005746, AL109628, AF067844, |
| | | | | | AC002366, AF164525, AP000068, AC002375, L40817, AL022317, AL031845, AC008989, |
| | | | | | U62293, AL031662, AC005057, AP000074, AP000695, AC003962, AP000694, Z82202, |
| | | | | | AC004813, AL008721, Z98742, AC002310, AC006088, AB017602, Z97054, AC003043, |
| | | | | | AL034400, AC005520, AC004052, AC006480, AC007688, AC005722, AC002044, L44140, |
| | | | | | AL049653, AC005887, AC007652, AL132796, AF001905, AC002080, AC005531, AL109759, |
| | | | | | AL109798, AC003991, AJ006997, AR060089, AL022302, AC006926, AC004217, AC004525, |
| | | | | | AC002303, AC005482, AC004478, AC006466, AC007785, AL133249, AC002492, AC006372, |
| | | | | | AC005632, AC006312, AC006015, AL031276, AF064019, AC004000, AL031056, AC004985, |
| | | | | | U55184, Z70243, AC002286, AC006503, Z69721, and AF217403. |
| HLDAV13 | 120 | 657191 | 1-458 | 15-472 | |
| HLDAV01 | 121 | 916462 | 1-466 | 15-480 | |
| HLDAR12 | 122 | 970634 | 1-450 | 15-464 | R38926, and AF131782. |
| HLDAK33 | 123 | 857107 | 1-441 | 15-455 | H55379, AB002328, AF072441, AP000352, and AF061947. |
| HLDAJ38 | 124 | 709138 | 1-464 | 15-478 | R00600, AA618364, and AL049557. |
| HLDAA31 | 125 | 586638 | 1-289 | 15-303 | AC005753. |
| HHNAC01 | 126 | 913646 | 1-710 | 15-724 | AA176633, and AA309418. |
| HHNAB42 | 127 | 714097 | 1-141 | 15-155 | AA309346, W96229, AA013298, AA057218, and Z58774. |
| HHLAB49 | 128 | 723222 | 1-481 | 15-495 | W03882, AA309231, and AC006360. |
| HFVKC87 | 129 | 886358 | 1-757 | 15-771 | C14389, D80253, D80366, D59859, D51423, D57483, D80166, D81030, D59889, D59619, |
| | | | | | D80210, D51799, D80240, D80038, D58283, D80188, D59275, D80212, D80022, C14331, |
| | | | | | D80024, D80195, D80219, D59467, D80391, D80164, D80043, D59787, D80227, D59502, |
| | | | | | D59610, AA305409, D80196, C15076, D59927, D80269, D51022, D50979, D80193, D50995, |
| | | | | | D80241, D80378, AW177440, D51060, AA305578, C14429, D80522, D80251, D80045, |
| | | | | | C75259, AW179328, T03269, AW178893, D80248, C14014, D81026, D58253, AA514188, |
| | | | | | AW378532, D80134, AA514186, D80133, AW178762, AW177501, AW177511, D51250, |
| | | | | | AW360811, AW178775, C05695, AW369651, D80268, AW352117, AW176467, AW375405, |
| | | | | | AW377671, AI910186, F13647, D51079, AW352158, D80949, D80132, AW366296, |
| | | | | | AW360844, AW360817, AW375406, AW378534, AW179332, AW377672, AW179023, |
| | | | | | AW178905, D80168, AW177505, D81111, D80439, C14298, C14227, D59373, D80064, |
| | | | | | D80302, AI905856, AW352171, AW377676, AW178906, AW352170, AW177731, AW178907, |
| | | | | | AW179019, AW179024, D80247, AW360841, AW179020, C14407, AW178909, AW177456, |
| | | | | | AW179329, AW178980, AW177733, AW378528, AW178908, AW178754, AW179018, |
| | | | | | Z21582, AW352174, AW378540, T11417, AW179004, D80157, AW179012, D51103, |
| | | | | | AW178914, AW378525, AW360834, D51759, AW367967, AW177722, AW177728, |
| | | | | | AW179009, AW178774, AW178911, AW378543, AW352163, D58246, AW177723, |
| | | | | | AA285331, D51097, C14077, AW178983, AW352120, AW178781, D58101, T48593, D59503, |
| | | | | | D45260, AI557751, C06015, D59653, D80014, C14975, D59627, H67854, AW177508, |
| | | | | | D80258, AI535850, AW378533, AW367950, C03092, H67866, D51213, AW177497, |
| | | | | | AA809122, D60010, AW178986, AI525923, AI525917, D51231, D80228, D50981, D51221, |
| | | | | | AW177734, D59474, T03116, AI525222, D59317, C14973, AI525920, C14344, D45273, |
| | | | | | AI557774, AA514184, C14957, AI525235, AI535686, D59551, D60214, AI525227, C14046, |
| | | | | | AI525912, AI525242, AI525215, T03048, AW378542, AI525925, AW378539, C05763, |
| | | | | | T02974, C16955, Z33452, AI535961, Z30160, AW360855, AI525237, D51053, H67858, |
| | | | | | A62298, AR018138, AJ132110, A84916, A62300, AR008278, AF058696, X67155, Y17188, |
| | | | | | AB028859, D26022, A25909, A67220, D89785, A78862, D34614, D88547, Y12724, 182448, |
| | | | | | X82626, AR025207, AR060385, A82595, AR016808, A94995, AB002449, AR008443, |
| | | | | | X68127, 150126, 150132, 150128, AB012117, 150133, AR066488, AR016514, AR066482, |
| | | | | | AR060138, A45456, A26615, AR052274, A85396, A44171, Y09669, A85477, A43192, |
| | | | | | A43190, AR038669, 119525, A86792, AR066490, AR066487, AR054175, A30438, AR008277, |
| | | | | | AR008281, X93549, 118367, D88507, 114842, D50010, Y17187, A63261, AR008408, X64588, |
| | | | | | AR062872, A70867, 179511, AR016691, AR016690, U46128, D13509, A64136, A68321, |
| | | | | | AR060133, AF135125, U79457, AF123263, AR032065, X93535, and AR008382. |
| HFVJW07 | 130 | 951883 | 1-504 | 15-518 | AA479489, AA426174, and AA644508. |
| HFVIP01 | 131 | 914567 | 1-352 | 15-366 | AL134860, AA974417, AI654691, AI969350, D83780, AP000029, and AR016238. |
| HFVID84 | 132 | 783129 | 1-482 | 15-496 | R60730, AI378536, and AL034371. |
| HFVID08 | 133 | 959739 | 1-504 | 15-518 | AI652763, AI637934, and Z58900. |
| HFVIC84 | 134 | 783131 | 1-505 | 15-519 | N80824, AA772353, AA678493, AI817455, H06525, AI089765, W90756, W85765, AI422410, |
| | | | | | AA705876, H05093, AW044213, H43423, AI375338, AA769792, AI378819, AW023286, and |
| | | | | | AL080199. |
| HFVIC30 | 135 | 881306 | 1-464 | 15-478 | T68667, H56313, and AF097518. |
| HFVHX74 | 136 | 854533 | 1-397 | 15-411 | AA192391. |
| HFVHU23 | 137 | 676060 | 1-683 | 15-697 | AA193508, AA909248, and AI271531. |
| HFVHR05 | 138 | 932181 | 1-535 | 15-549 | AL046172, H59509, and H23797. |
| HFVHQ93 | 139 | 792444 | 1-498 | 15-512 | T83742, and AA135378. |
| HFVGY60 | 140 | 710929 | 1-301 | 15-315 | AA829531, AP000154, and AP000012. |
| HFVGM12 | 141 | 971182 | 1-316 | 15-330 | R68859, AI217090, AA381194, AA299087, AA828662, AA491438, AA828588, AI348780, |
| | | | | | AA828569, AA947364, AA508418, AI613419, AA653823, AI400912, AA299351, AL042753, |
| | | | | | AI867386, AA523490, AA626637, AW008062, AI697369, AI887768, AI799421, AA226260, |
| | | | | | AW439724, AI693478, AI914151, AI951436, AA160566, AW169469, AL133861, AA493667, |
| | | | | | AA164356, AA228442, AW167267, AA070240, AW078552, AW193493, AA564753, |
| | | | | | AA169768, AA365688, AA780648, AL039958, AA167179, AI292085, AI264046, AA339079, |
| | | | | | AW166968, AA658360, AI298710, AI075266, AI038990, AI298079, AI610634, AA744449, |
| | | | | | AA744465, AA745470, AA714595, H91358, AW440662, AI338806, AA633039, AC002477, |
| | | | | | AJ003147, AC004831, AC004148, AC004107, AC004398, AC006323, AC006026, AC007395, |
| | | | | | AC007278, AL133246, AC004167, AF111168, AF088219, AC000379, AC002301, AL022476, |
| | | | | | AC002418, Z83843, AC004386, AL035417, AL031775, AL035603, AC001643, AC002319, |
| | | | | | AC005043, D86991, AC000051, D87002, AC007204, AC012331, AC002308, AP000356, |
| | | | | | AC002094, AL096712, AC003681, AC004493, AC004223, AC007285, AL021938, AC005562, |
| | | | | | AC004220, AL035070, AC008040, AC005544, AL031734, AC007021, AC005800, AC007226, |
| | | | | | D86995, AL035410, AL035685, U91323, AP000555, AC007052, AB033094, AC005781, |
| | | | | | AC007686, AC002312, AL133321, AP000128, AP000206, AL035530, AL008583, AP000245, |
| | | | | | AL133371, AC003986, AC006966, AF064861, AL008708, AC004232, AC005621, AL035659, |
| | | | | | AL035420, AC013417, AC004655, AB020863, AC007436, AC007656, AL080243, AC005037, |
| | | | | | AC005523, Z69714, AC004500, AC005875, AC004765, Z96622, AJ246003, AL022339, |
| | | | | | AC006071, AC005300, AC002115, AC004841, AC004491, AC006946, AF109907, AC004000, |
| | | | | | AC008981, AL031280, AC004188, AC005288, AF196969, AP000302, AC004209, AP000114, |
| | | | | | AP000046, AP000514, AP000067, AC004534, AF042484, AL121658, U29874, D87004, |
| | | | | | M64554, AL080242, AC005613, AC006974, Z84477, AC004854, AL122021, AC005924, |
| | | | | | AC002400, AL031427, AC005747, AL031591, Z83840, AC004629, AC006275, and Z93023. |
| HFVBA27 | 142 | 414543 | 1-787 | 15-801 | AI114725, N58282, H67798, R83539, N77653, AA972043, AA005004, H68072, AI298350, |
| | | | | | AA343394, AI133372, and H71687. |
| HFLVG70 | 143 | 757521 | 1-443 | 15-457 | W87617. |
| HFLUE23 | 144 | 676425 | 1-394 | 15-408 | T84238. |
| HFLUE22 | 145 | 522779 | 1-209 | 15-223 | |
| HFLUD68 | 146 | 753847 | 1-518 | 15-532 | AA007365. |
| HFLQJ68 | 147 | 753216 | 1-368 | 15-382 | H81620, and T91378. |
| HFLQJ38 | 148 | 709034 | 1-343 | 15-357 | T81723, T84581, R99474, R28738, T82031, T78557, and AF209192. |
| HALTA38 | 149 | 705895 | 1-474 | 15-488 | AI674565, AI951211, AI924393, AA923771, AI738800, AW269753, AI567999, AA933997, |
| | | | | | AA917891, C16507, AA876404, AA983837, AI300768, AW193725, AA054746, AA313302, |
| | | | | | D79800, T41071, T40203, C16565, C16572, and AL137761. |
| HALSD90 | 150 | 500844 | 1-327 | 15-341 | AL035703. |
| HALSD51 | 151 | 500852 | 1-317 | 15-331 | Z98745, and AC005678. |
| HALSD34 | 152 | 509765 | 1-317 | 15-331 | |
| HALSD03 | 153 | 960910 | 1-396 | 15-410 | |
| HALSC37 | 154 | 705894 | 1-298 | 15-312 | |
| HALSC18 | 155 | 667044 | 1-348 | 15-362 | AL038842, AA593537, AI431240, AW271904, AA659360, AA284247, AA214316, N30291, |
| | | | | | AA480792, AA493546, AW021774, AA584360, AI889245, AA601336, AA501807, |
| | | | | | AW410715, AA565426, AC005183, U89337, AL022311, AC005071, AC005940, AC005971, |
| | | | | | AC005484, Z95115, AL035071, U62317, AC005099, AC004020, AL133246, AC005288, |
| | | | | | AF196972, AC006597, AL035458, Z97054, AC006026, L78810, AL139054, AC004878, |
| | | | | | AL031276, AC006251, AC004000, AL050308, AP000557, AC006965, AP000103, AL133245, |
| | | | | | AC003041, AL109952, AL024474, AC004099, Z75888, AL049766, AP000501, AL031680, |
| | | | | | AC004973, AF001549, AE000658, AL049779, AC009516, AC002302, AL049829, AC005225, |
| | | | | | AC006312, AC012384, AL023553, AC004656, Z75887, AL024498, AC005207, AL049776, |
| | | | | | AP000100, AL031311, AP000349, Z95116, AL008718, AC004659, AC005041, AC004966, |
| | | | | | AL022318, AL078581, AC005015, AC000353, Z94056, X55448, AC002425, AL109963, |
| | | | | | AC002470, AC002310, AP000033, AC005255, AC004750, AF111168, AL121658, AC002531, |
| | | | | | AC004921, AF015416, AL035420, AC004815, AD000092, AL033521, AC002456, AC007041, |
| | | | | | U78027, Z98743, AC006538, AC005081, AL096710, AF134726, U85195, AC002350, |
| | | | | | AL031428, AC005821, AC005067, AF064861, AC004890, AC005933, AL035587, AC006511, |
| | | | | | AL109827, AL035422, AC004148, AC005295, AP000503, AP000165, AP000118, AC007308, |
| | | | | | AC005531, AC005570, AC002369, AC005899, Z97353, AC005887, AP000248, AL009181, |
| | | | | | AC005799, AC004167, AL022316, AC005878, AL121657, AC002565, AC004975, AL021392, |
| | | | | | AC005562, AC007690, AL031681, AL022721, AC003982, AC005200, AC005527, AC007216, |
| | | | | | AC007842, AC005529, AL034548, U91321, AC006480, AC007637, AC006449, AC005726, |
| | | | | | AC004129, L44140, AC006011, AC000134, K02579, AC009510, U91318, AC008115, |
| | | | | | AC004805, AF196779, AF165926, AC007686, AC005778, AC005409, AP000213, AL096775, |
| | | | | | AL096702, AP000300, AP000135, AC007388, AC002073, Z86090, AF184110, Z98950, |
| | | | | | Z84469, AC007160, AC000025, AC004477, AC005036, AP000065, AC004526, AC005088, |
| | | | | | AL109628, Z85987, AL132992, AC004686, AL049839, AF001552, AP000031, AC004913, |
| | | | | | AF130343, AL109865, AC006141, AC002544, AL022333, AC006285, AC005568, AC005598, |
| | | | | | AC005391, AC004634, AL031291, AF124523, AC004702, AC009363, AC005084, AP000493, |
| | | | | | AL035415, AC004149, AC003042, AC007376, AC005330, AC005666, AL031283, AF031078, |
| | | | | | AL021579, AP000113, AP000045, AP000704, and AL022320. |

[0086] TABLE 4

| Code | Description | Tissue | Organ | Cell Line | Disease | Vector |
|---|---|---|---|---|---|---|
| AR022 | a_Heart | a_Heart | | | | |
| AR023 | a_Liver | a_Liver | | | | |
| AR024 | a_mammary gland | a_mammary gland | | | | |
| AR025 | a_Prostate | a_Prostate | | | | |
| AR026 | a_small intestine | a_small intestine | | | | |
| AR027 | a_Stomach | a_Stomach | | | | |
| AR028 | Blood B cells | Blood B cells | | | | |
| AR029 | Blood B cells activated | Blood B cells | | | | |
| | | activated | | | | |
| AR030 | Blood B cells resting | Blood B cells | | | | |
| | | resting | | | | |
| AR031 | Blood T cells activated | Blood T cells | | | | |
| | | activated | | | | |
| AR032 | Blood T cells resting | Blood T cells resting | | | | |
| AR033 | brain | brain | | | | |
| AR034 | breast | breast | | | | |
| AR035 | breast cancer | breast cancer | | | | |
| AR036 | Cell Line CAOV3 | Cell Line CAOV3 | | | | |
| AR037 | cell line PA-I | cell line PA-I | | | | |
| AR038 | cell line transformed | cell line transformed | | | | |
| AR039 | colon | colon | | | | |
| AR040 | colon (9808co65R) | colon (9808co65R) | | | | |
| AR041 | colon (9809co15) | colon (9809co15) | | | | |
| AR042 | colon cancer | colon cancer | | | | |
| AR043 | colon cancer | colon cancer | | | | |
| | (9808co64R) | (9808co64R) | | | | |
| AR044 | colon cancer 9809co14 | colon cancer | | | | |
| | | 9809co14 | | | | |
| AR045 | corn clone 5 | corn clone 5 | | | | |
| AR046 | corn clone 6 | corn clone 6 | | | | |
| AR047 | corn clone 2 | corn clone 2 | | | | |
| AR048 | corn clone 3 | corn clone 3 | | | | |
| AR049 | Corn Clone 4 | Corn Clone 4 | | | | |
| AR050 | Donor II B Cells 24 hrs | Donor II B Cells | | | | |
| | | 24 hrs | | | | |
| AR051 | Donor II B Cells 72 hrs | Donor II B Cells | | | | |
| | | 72 hrs | | | | |
| AR052 | Donor II B-Cells 24 hrs. | Donor II B-Cells 24 | | | | |
| | | hrs. | | | | |
| AR053 | Donor II B-Cells 72 hrs | Donor II B-Cells | | | | |
| | | 72 hrs | | | | |
| AR054 | Donor II Resting B Cells | Donor II Resting B | | | | |
| | | Cells | | | | |
| AR055 | Heart | Heart | | | | |
| AR056 | Human Lung (clonetech) | Human Lung | | | | |
| | | (clonetech) | | | | |
| AR057 | Human Mammary | Human Mammary | | | | |
| | (clontech) | (clontech) | | | | |
| AR058 | Human Thymus | Human Thymus | | | | |
| | (clonetech) | (clonetech) | | | | |
| AR059 | Jurkat (unstimulated) | Jurkat | | | | |
| | | (unstimulated) | | | | |
| AR060 | Kidney | Kidney | | | | |
| AR061 | Liver | Liver | | | | |
| AR062 | Liver (Clontech) | Liver (Clontech) | | | | |
| AR063 | Lymphocytes chronic | Lymphocytes | | | | |
| | lymphocytic leukaemia | chronic lymphocytic | | | | |
| | | leukaemia | | | | |
| AR064 | Lymphocytes diffuse | Lymphocytes | | | | |
| | large B cell lymphoma | diffuse large B cell | | | | |
| | | lymphoma | | | | |
| AR065 | Lymphocytes follicular | Lymphocytes | | | | |
| | lymphoma | follicular lymphoma | | | | |
| AR066 | normal breast | normal breast | | | | |
| AR067 | Normal Ovarian | Normal Ovarian | | | | |
| | (4004901) | (4004901) | | | | |
| AR068 | Normal Ovary | Normal Ovary | | | | |
| | 9508G045 | 9508G045 | | | | |
| AR069 | Normal Ovary | Normal Ovary | | | | |
| | 9701G208 | 9701G208 | | | | |
| AR070 | Normal Ovary | Normal Ovary | | | | |
| | 9806G005 | 9806G005 | | | | |
| AR071 | Ovarian Cancer | Ovarian Cancer | | | | |
| AR072 | Ovarian Cancer | Ovarian Cancer | | | | |
| | (97020001) | (9702G001) | | | | |
| AR073 | Ovarian Cancer | Ovarian Cancer | | | | |
| | (97070029) | (97070029) | | | | |
| AR074 | Ovarian Cancer | Ovarian Cancer | | | | |
| | (98040011) | (98040011) | | | | |
| AR075 | Ovarian Cancer | Ovarian Cancer | | | | |
| | (98060019) | (9806G019) | | | | |
| AR076 | Ovarian Cancer | Ovarian Cancer | | | | |
| | (98070017) | (98070017) | | | | |
| AR077 | Ovarian Cancer | Ovarian Cancer | | | | |
| | (98090001) | (98090001) | | | | |
| AR078 | ovarian cancer 15799 | ovarian cancer | | | | |
| | | 15799 | | | | |
| AR079 | Ovarian Cancer | Ovarian Cancer | | | | |
| | 17717A1D | 17717A1D | | | | |
| AR080 | Ovarian Cancer | Ovarian Cancer | | | | |
| | 4004664B1 | 4004664B1 | | | | |
| AR081 | Ovarian Cancer | Ovarian Cancer | | | | |
| | 4005315A1 | 4005315A1 | | | | |
| AR082 | ovarian cancer | ovarian cancer | | | | |
| | 94127303 | 94127303 | | | | |
| AR083 | Ovarian Cancer | Ovarian Cancer | | | | |
| | 96069304 | 96069304 | | | | |
| AR084 | Ovarian Cancer | Ovarian Cancer | | | | |
| | 97076029 | 9707G029 | | | | |
| AR085 | Ovarian Cancer | Ovarian Cancer | | | | |
| | 9807G045 | 9807G045 | | | | |
| AR086 | ovarian cancer | ovarian cancer | | | | |
| | 9809G001 | 9809G001 | | | | |
| AR087 | Ovarian Cancer | Ovarian Cancer | | | | |
| | 9905C032RC | 9905C032RC | | | | |
| AR088 | Ovarian cancer 9907 | Ovarian cancer 9907 | | | | |
| | C00 3rd | C00 3rd | | | | |
| AR089 | Prostate | Prostate | | | | |
| AR090 | Prostate (clonetech) | Prostate (clonetech) | | | | |
| AR091 | prostate cancer | prostate cancer | | | | |
| AR092 | prostate cancer #15176 | prostate cancer | | | | |
| | | #15176 | | | | |
| AR093 | prostate cancer #15509 | prostate cancer | | | | |
| | | #15509 | | | | |
| AR094 | prostate cancer #15673 | prostate cancer | | | | |
| | | #15673 | | | | |
| AR095 | Small Intestine | Small Intestine | | | | |
| | (Clontech) | (Clontech) | | | | |
| AR096 | Spleen | Spleen | | | | |
| AR097 | Thymus T cells activated | Thymus T cells | | | | |
| | | activated | | | | |
| AR098 | Thymus T cells resting | Thymus T cells | | | | |
| | | resting | | | | |
| AR099 | Tonsil | Tonsil | | | | |
| AR100 | Tonsil germinal center | Tonsil germinal | | | | |
| | centroblast | center centroblast | | | | |
| AR101 | Tonsil germinal center B | Tonsil germinal | | | | |
| | cell | center B cell | | | | |
| AR102 | Tonsil lymph node | Tonsil lymph node | | | | |
| AR103 | Tonsil memory B cell | Tonsil memory B | | | | |
| | | cell | | | | |
| AR104 | Whole Brain | Whole Brain | | | | |
| AR105 | Xenograft ES-2 | Xenograft ES-2 | | | | |
| AR106 | Xenograft SW626 | Xenograft SW626 | | | | |
| H0047 | Human Fetal Liver | Human Fetal Liver | Liver | | | Uni-ZAP XR |
| H0098 | Human Adult Liver | Human Adult Liver | Liver | | | Uni-ZAP XR |
| | subtracted | | | | | |
| H0147 | Human Adult Liver | Human Adult Liver | Liver | | | Uni-ZAP XR |
| H0152 | Early Stage Human | Human Fetal Liver | Liver | | | Uni-ZAP XR |
| | Liver, fract (II) | | | | | |
| H0197 | Human Fetal Liver | Human Fetal Liver | Liver | | | Uni-ZAP XR |
| | subtracted | | | | | |
| H0198 | Human Fetal Liver | Human Fetal Liver | Liver | | | Uni-ZAP XR |
| | subtracted, pos. clon | | | | | |
| H0199 | Human Fetal Liver | Human Fetal Liver | Liver | | | Uni-ZAP XR |
| | subtracted, neg clone | | | | | |
| H0246 | Human Fetal Liver- | Human Fetal Liver | Liver | | | Uni-ZAP XR |
| | Enzyme subtraction | | | | | |
| H0349 | human adult liver cDNA | Human Adult Liver | Liver | | | pCMV Sport 1 |
| | library | | | | | |
| H0355 | Human Liver | Human Liver, | | | | pCMVSport 1 |
| | | normal Adult | | | | |
| H0357 | H. Normalized Fetal | Human Fetal Liver | Liver | | | Uni-ZAP XR |
| | Liver, II | | | | | |
| H0393 | Fetal Liver, subtraction | Human Fetal Liver | Liver | | | pBluescript |
| | II | | | | | |
| H0509 | Liver, Hepatoma | Human Liver, | Liver | | disease | pCMV Sport |
| | | Hepatoma. patient 8 | | | | 30 |
| H0510 | Human Liver, normal | Human Liver, | Liver | | | pCMVSport |
| | | normal, Patient #8 | | | | 3.0 |
| S0440 | Liver Tumour Met 5 Tu | Liver Tumour | | | | pSport1 |
| T0090 | Liver, normal | | | | | pBluescript |
| | | | | | | SK- |
| T0091 | Liver, hepatocellular | | | | | pBluescript |
| | carcinoma | | | | | SK- |
| L0157 | Human fetal brain | | brain | | | |
| | (TFujiwara) | | | | | |
| L0361 | Stratagene ovary | | ovary | | | Bluescript SK |
| | (#937217) | | | | | |
| L0372 | NCI_CGAP_Col2 | colon tumor | colon | | | Bluescript |
| | | | | | | SK- |
| L0393 | B, Human Liver tissue | | | | | gt11 |
| L0438 | normalized infant brain | total brain | brain | | | lafmid BA |
| | cDNA | | | | | |
| L0439 | Soares infant brain 1NIB | | whole brain | | | Lafmid BA |
| L0483 | Human pancreatic islet | | | | | Lambda |
| | | | | | | ZAPII |
| L0517 | NCI_CGAP_Pr1 | | | | | pAMP10 |
| L0581 | Stratagene liver | | liver | | | pBluescript |
| | (#937224) | | | | | SK |
| L0589 | Stratagene fetal retina | | | | | pBluescript |
| | 937202 | | | | | SK- |
| L0591 | Stratagene HeLa cell s3 | | | | | pBluescript |
| | 937216 | | | | | SK- |
| L0592 | Stratagene hNT neuron | | | | | pBluescript |
| | (#937233) | | | | | SK- |
| L0594 | Stratagene | | | | | pBluescript |
| | neuroepithelium | | | | | SK- |
| | NT2RAMI 937234 | | | | | |
| L0596 | Stratagene colon | | colon | | | pBluescript |
| | (#937204) | | | | | SK- |
| L0600 | Weizmann Olfactory | olfactory epithelium | nose | | | pBluescript |
| | Epithelium | | | | | SK- |
| L0617 | Chromosome 22 exon | | | | | pBluescript11 |
| | | | | | | KS+ |
| L0662 | NCI_CGAP_Gas4 | poorly differentiated | stomach | | | pCMV- |
| | | adenocarcinoma | | | | SPORT6 |
| | | with signet r | | | | |
| L0731 | Soares_pregnant_uterus_{—} | | uterus | | | pT7T3-Pac |
| | NbHPU | | | | | |
| L0741 | Soares adult brain | | brain | | | pT7T3D |
| | N2b4HB55Y | | | | | (Pharmacia) |
| | | | | | | with a |
| | | | | | | modified |
| | | | | | | polylinker |
| L0742 | Soares adult brain | | brain | | | pT7T3D |
| | N2b5HB55Y | | | | | (Pharmacia) |
| | | | | | | with a |
| | | | | | | modified |
| | | | | | | polylinker |
| L0743 | Soares breast 2NbHBst | | breast | | | pT7T3D |
| | | | | | | (Pharmacia) |
| | | | | | | with a |
| | | | | | | modified |
| | | | | | | polylinker |
| L0744 | Soares breast 3NbHBst | | breast | | | pT7T3D |
| | | | | | | (Pharmacia) |
| | | | | | | with a |
| | | | | | | modified |
| | | | | | | polylinker |
| L0745 | Soares retina N2b4HR | retina | eye | | | pT7T3D |
| | | | | | | (Pharmacia) |
| | | | | | | with a |
| | | | | | | modified |
| | | | | | | polylinker |
| L0747 | Soares_fetal_heart_NbH | | heart | | | pT7T3D |
| | H19W | | | | | (Pharmacia) |
| | | | | | | with a |
| | | | | | | modified |
| | | | | | | polylinker |
| L0748 | Soares fetal liver spleen | | Liver and | | | pT7T3D |
| | 1NFLS | | Spleen | | | (Pharmacia) |
| | | | | | | with a |
| | | | | | | modified |
| | | | | | | polylinker |
| L0749 | Soares_fetal_liver_spleen_{—} | | Liver and | | | pT7T3D |
| | 1NFLS_S1 | | Spleen | | | (Pharmacia) |
| | | | | | | with a |
| | | | | | | modified |
| | | | | | | polylinker |
| L0750 | Soares_fetal_lung_NbH | | lung | | | pT7T3D |
| | L19W | | | | | (Pharmacia) |
| | | | | | | with a |
| | | | | | | modified |
| | | | | | | polylinker |
| L0753 | Soares_pineal_gland_N3 | | pineal | | | pT7T3D |
| | HPG | | gland | | | (Pharmacia) |
| | | | | | | with a |
| | | | | | | modified |
| | | | | | | polylinker |
| L0754 | Soares placenta Nb2HP | | placenta | | | pT7T3D |
| | | | | | | (Pharmacia) |
| | | | | | | with a |
| | | | | | | modified |
| | | | | | | polylinker |
| L0755 | Soares_placenta_8to9weeks_{—} | | placenta | | | pT7T3D |
| | 2NbHP8to9W | | | | | (Pharmacia) |
| | | | | | | with a |
| | | | | | | modified |
| | | | | | | polylinker |
| L0756 | Soares_multiple_sclerosis_{—} | multiple sclerosis | | | | pT7T3D |
| | 2NbHMSP | lesions | | | | (Pharmacia) |
| | | | | | | with a |
| | | | | | | modified |
| | | | | | | polylinker |
| | | | | | | V_TYPE |
| L0758 | Soares_testis_NHT | | | | | pT7T3D-Pac |
| | | | | | | (Pharmacia) |
| | | | | | | with a |
| | | | | | | modified |
| | | | | | | polylinker |
| L0759 | Soares_total_fetus_Nb2 | | | | | pT7T3D-Pac |
| | HF8_9w | | | | | (Pharmacia) |
| | | | | | | with a |
| | | | | | | modified |
| | | | | | | polylinker |
| L0761 | NCI_CGAP_CLL1 | B-cell, chronic | | | | pT7T3D-Pac |
| | | lymphotic leukemia | | | | (Pharmacia) |
| | | | | | | with a |
| | | | | | | modified |
| | | | | | | polylinker |
| L0766 | NCI_CGAP_GCB1 | germinal center B | | | | pT7T3D-Pac |
| | | cell | | | | (Pharmacia) |
| | | | | | | with a |
| | | | | | | modified |
| | | | | | | polylinker |
| L0768 | NCI_CGAP_GC4 | pooled germ cell | | | | pT7T3D-Pac |
| | | tumors | | | | (Pharmacia) |
| | | | | | | with a |
| | | | | | | modified |
| | | | | | | polylinker |
| L0774 | NCI_CGAP_Kid3 | | kidney | | | pT7T3D-Pac |
| | | | | | | (Pharmacia) |
| | | | | | | with a |
| | | | | | | modified |
| | | | | | | polylinker |
| L0777 | Soares_NhHMPu_S1 | Pooled human | mixed (see | | | pT7T3D-Pac |
| | | melanocyte, fetal | below) | | | (Pharmacia) |
| | | heart, and pregnant | | | | with a |
| | | | | | | modified |
| | | | | | | polylinker |
| L0779 | Soares_NFL_T_GBC_S1 | | pooled | | | pT7T3D-Pac |
| | | | | | | (Pharmacia) |
| | | | | | | with a |
| | | | | | | modified |
| | | | | | | polylinker |
| L0794 | NCI_CGAP_GC6 | pooled germ cell | | | | pT7T3 D-Pac |
| | | tumors | | | | (Pharmacia) |
| | | | | | | with a |
| | | | | | | modified |
| | | | | | | polylinker |
| L0803 | NCI_CGAP_Kid11 | | kidney | | | pT7T3D-Pac |
| | | | | | | (Pharmacia) |
| | | | | | | with a |
| | | | | | | modified |
| | | | | | | polylinker |
| L0805 | NCI_CGAP_Lu24 | carcinoid | lung | | | pT7T3D-Pac |
| | | | | | | (Pharmacia) |
| | | | | | | with a |
| | | | | | | modified |
| | | | | | | polylinker |
| L0809 | NCI_CGAP_Pr28 | | prostate | | | pT7T3D-Pac |
| | | | | | | (Pharmacia) |
| | | | | | | with a |
| | | | | | | modified |
| | | | | | | polylinker |

[0087] TABLE 5

| OMIM | |
|---|---|
| Reference | Description |
| 109565 | Lymphoma, B-cell |
| 109565 | Lymphoma, diffuse large cell |
| 123620 | Cataract, cerulean, type 2, 601547 |
| 139330 | Night blindness, congenital stationary |
| 139360 | Pituita ACTH-secretin adenoma |
| 142640 | Thrombophilia due to elevated HRG |
| 147781 | Atopy, susceptibility to |
| 150250 | Larsen syndrome, autosomal dominant |
| 156845 | Tietz syndrome, 103500 |
| 156845 | Waardenburg syndrome, type IIA, 193510 |
| 156845 | Waardenburg syndrome/ocular albinism, digenic, 103470 |
| 164500 | Spinocerebellar ataxia-7 |
| 165500 | Optic atrophy 1 |
| 172471 | Glycogenosis, hepatic, autosomal |
| 182280 | Small-cell cancer of lung |
| 182381 | Renal glucosuria, 253100 |
| 228960 | [Kininogen deficiency] |
| 261515 | Peroxisomal bifunctional enzyme deficiency |
| 600044 | Thrombocythemia, essential, 187950 |
| 600163 | Long QT syndrome-3 |
| 600700 | Lipoma |
| 600850 | Schizophrenia disorder-4 |
| 600971 | Deathess, autosomal recessive 6 |
| 601226 | Progressive external ophthalmoplegia, type 2 |
| 601267 | HIV infection, susceptibiliy/resistence to |
| 601373 | HIV infection, susceptibility/resistance to |

### Polynucleotide and Polypeptide Variants

[0088] The present invention is also directed to variants of the liver associated polynucleotide sequence disclosed in SEQ ID NO:X or the complementary strand thereto, nucleotide sequences encoding the polypeptide of SEQ ID NO:Y, the nucleotide sequence of SEQ ID NO:X encoding the polypeptide sequence as defined in column 6 of Table 1A, nucleotide sequences encoding the polypeptide as defined in column 6 of Table 1A, the nucleotide sequence as defined in columns 8 and 9 of Table 2, nucleotide sequences encoding the polypeptide encoded by the nucleotide sequence as defined in columns 8 and 9 of Table 2, the nucleotide sequence as defined in column 6 of Table 1B, nucleotide sequences encoding the polypeptide encoded by the nucleotide sequence as defined in column 6 of Table 1B, the cDNA sequence contained in Clone ID NO:Z, and/or nucleotide sequences encoding a polypeptide encoded by the cDNA sequence contained in Clone ID NO:Z.

[0089] The present invention also encompasses variants of the polypeptide sequence disclosed in SEQ ID NO:Y, a polypeptide sequence as defined in column 6 of Table 1A, a polypeptide sequence encoded by the polynucleotide sequence in SEQ ID NO:X, a polypeptide sequence encoded by the nucleotide sequence as defined in columns 8 and 9 of Table 2, a polypeptide sequence encoded by the nucleotide sequence as defined in column 6 of Table 1B, a polypeptide sequence encoded by the complement of the polynucleotide sequence in SEQ ID NO:X, and/or a polypeptide sequence encoded by the cDNA sequence contained in Clone ID NO:Z.

[0090] “Variant” refers to a polynucleotide or polypeptide differing from the polynucleotide or polypeptide of the present invention, but retaining essential properties thereof. Generally, variants are overall closely similar, and, in many regions, identical to the polynucleotide or polypeptide of the present invention.

[0091] Thus, one aspect of the invention provides an isolated nucleic acid molecule comprising, or alternatively consisting of, a polynucleotide having a nucleotide sequence selected from the group consisting of: (a) a nucleotide sequence described in SEQ ID NO:X or contained in the cDNA sequence of Clone ID NO:Z; (b) a nucleotide sequence in SEQ ID NO:X or the cDNA in Clone ID NO:Z which encodes a mature liver associated polypeptide; (c) a nucleotide sequence in SEQ ID NO:X or the cDNA sequence of Clone ID NO:Z, which encodes a biologically active fragment of a liver associated polypeptide; (d) a nucleotide sequence in SEQ ID NO:X or the cDNA sequence of Clone ID NO:Z, which encodes an antigenic fragment of a liver associated polypeptide; (e) a nucleotide sequence encoding a liver associated polypeptide having the complete amino acid sequence of SEQ ID NO:Y or the complete amino acid sequence encoded by the cDNA in Clone ID NO:Z; (f) a nucleotide sequence encoding a mature liver associated polypeptide of the amino acid sequence of SEQ ID NO:Y or the amino acid sequence encoded by the cDNA in Clone ID NO:Z; (g) a nucleotide sequence encoding a biologically active fragment of a liver associated polypeptide having the complete amino acid sequence of SEQ ID NO:Y or the complete amino acid sequence encoded by the cDNA in Clone ID NO:Z; (h) a nucleotide sequence encoding an antigenic fragment of a liver associated polypeptide having the complete amino acid sequence of SEQ ID NO:Y or the complete amino acid sequence encoded by the cDNA in Clone ID NO:Z; and (i) a nucleotide sequence complementary to any of the nucleotide sequences in (a), (b), (c), (d), (e), (f), (g), or (h), above.

[0092] The present invention is also directed to nucleic acid molecules which comprise, or alternatively consist of, a nucleotide sequence which is at least 80%, 85%, 90%, 95%, 96%, 97%, 98%, 99% or 100%, identical to, for example, any of the nucleotide sequences in (a), (b), (c), (d), (e), (f), (g), (h), or (i) above, the nucleotide coding sequence in SEQ ID NO:X or the complementary strand thereto, the nucleotide coding sequence of the cDNA contained in Clone ID NO:Z or the complementary strand thereto, a nucleotide sequence encoding the polypeptide of SEQ ID NO:Y, a nucleotide sequence encoding a polypeptide sequence encoded by the nucleotide sequence in SEQ ID NO:X, a polypeptide sequence encoded by the complement of the polynucleotide sequence in SEQ ID NO:X, a nucleotide sequence encoding the polypeptide encoded by the cDNA contained in Clone ID NO:Z, the nucleotide coding sequence in SEQ ID NO:X as defined in columns 8 and 9 of Table 2 or the complementary strand thereto, a nucleotide sequence encoding the polypeptide encoded by the nucleotide sequence in SEQ ID NO:X as defined in columns 8 and 9 of Table 2 or the complementary strand thereto, the nucleotide coding sequence in SEQ ID NO:B as defined in column 6 of Table 1B or the complementary strand thereto, a nucleotide sequence encoding the polypeptide encoded by the nucleotide sequence in SEQ ID NO:B as defined in column 6 of Table 1B or the complementary strand thereto, the nucleotide sequence in SEQ ID NO:X encoding the polypeptide sequence as defined in column 6 of Table 1A or the complementary strand thereto, nucleotide sequences encoding a polypeptide as defined in column 6 of Table 1A or the complementary strand thereto, and/or polynucleotide fragments of any of these nucleic acid molecules (e.g., those fragments described herein). Polynucleotides which hybridize to the complement of these nucleic acid molecules under stringent hybridization conditions or alternatively, under lower stringency conditions, are also encompassed by the invention, as are polypeptides encoded by these polynucleotides and nucleic acids.

[0093] In a preferred embodiment, the invention encompasses nucleic acid molecules which comprise, or alternatively, consist of a polynucleotide which hybridizes under stringent hybridization conditions, or alternatively, under lower stringency conditions, to a polynucleotide in (a), (b), (c), (d), (e), (f), (g), (h), or (i) above, as are polypeptides encoded by these polynucleotides. In another preferred embodiment, polynucleotides which hybridize to the complement of these nucleic acid molecules under stringent hybridization conditions or alternatively, under lower stringency conditions, are also encompassed by the invention, as are polypeptides encoded by these polynucleotides.

[0094] In another embodiment, the invention provides a purified protein comprising, or alternatively consisting of, a polypeptide having an amino acid sequence selected from the group consisting of: (a) the complete amino acid sequence of SEQ ID NO:Y or the complete amino acid sequence encoded by the cDNA in Clone ID NO:Z; (b) the amino acid sequence of a mature liver associated polypeptide having the amino acid sequence of SEQ ID NO:Y or the amino acid sequence encoded by the cDNA in Clone ID NO:Z; (c) the amino acid sequence of a biologically active fragment of a liver associated polypeptide having the complete amino acid sequence of SEQ ID NO:Y or the complete amino acid sequence encoded by the cDNA in Clone ID NO:Z; and (d) the amino acid sequence of an antigenic fragment of a liver associated polypeptide having the complete amino acid sequence of SEQ ID NO:Y or the complete amino acid sequence encoded by the cDNA in Clone ID NO:Z.

[0095] The present invention is also directed to proteins which comprise, or alternatively consist of, an amino acid sequence which is at least 80%, 85%, 90%, 95%, 96%, 97%, 98%, 99% or 100%, identical to, for example, any of the amino acid sequences in (a), (b), (c), or (d), above, the amino acid sequence shown in SEQ ID NO:Y, the amino acid sequence encoded by the cDNA contained in Clone ID NO:Z, the amino acid sequence of the polypeptide encoded by the nucleotide sequence in SEQ ID NO:X as defined in columns 8 and 9 of Table 2, the amino acid sequence of the polypeptide encoded by the nucleotide sequence in SEQ ID NO:B as defined in column 6 of Table 1B, the amino acid sequence as defined in column 6 of Table 1A, an amino acid sequence encoded by the nucleotide sequence in SEQ ID NO:X, and an amino acid sequence encoded by the complement of the polynucleotide sequence in SEQ ID NO:X. Fragments of these polypeptides are also provided (e.g., those fragments described herein). Further proteins encoded by polynucleotides which hybridize to the complement of the nucleic acid molecules encoding these amino acid sequences under stringent hybridization conditions or alternatively, under lower stringency conditions, are also encompassed by the invention, as are the polynucleotides encoding these proteins.

[0096] By a nucleic acid having a nucleotide sequence at least, for example, 95% “identical” to a reference nucleotide sequence of the present invention, it is intended that the nucleotide sequence of the nucleic acid is identical to the reference sequence except that the nucleotide sequence may include up to five point mutations per each 100 nucleotides of the reference nucleotide sequence encoding the polypeptide. In other words, to obtain a nucleic acid having a nucleotide sequence at least 95% identical to a reference nucleotide sequence, up to 5% of the nucleotides in the reference sequence may be deleted or substituted with another nucleotide, or a number of nucleotides up to 5% of the total nucleotides in the reference sequence may be inserted into the reference sequence. The query sequence may be an entire sequence referred to in Table 1A or 2 as the ORF (open reading frame), or any fragment specified, as described herein.

[0097] As a practical matter, whether any particular nucleic acid molecule or polypeptide is at least 80%, 85%, 90%, 95%, 96%, 97%, 98% or 99% identical to a nucleotide sequence of the present invention can be determined conventionally using known computer programs. A preferred method for determining the best overall match between a query sequence (a sequence of the present invention) and a subject sequence, also referred to as a global sequence alignment, can be determined using the FASTDB computer program based on the algorithm of Brutlag et al. (Comp. App. Biosci. 6:237-245 (1990)). In a sequence alignment the query and subject sequences are both DNA sequences. An RNA sequence can be compared by converting U's to T's. The result of said global sequence alignment is expressed as percent identity. Preferred parameters used in a FASTDB alignment of DNA sequences to calculate percent identity are: Matrix=Unitary, k-tuple=4, Mismatch Penalty=1, Joining Penalty=30, Randomization Group Length=0, Cutoff Score=1, Gap Penalty=5, Gap Size Penalty 0.05, Window Size=500 or the length of the subject nucleotide sequence, whichever is shorter.

[0098] If the subject sequence is shorter than the query sequence because of 5′ or 3′ deletions, not because of internal deletions, a manual correction must be made to the results. This is because the FASTDB program does not account for 5′ and 3′ truncations of the subject sequence when calculating percent identity. For subject sequences truncated at the 5′ or 3′ ends, relative to the query sequence, the percent identity is corrected by calculating the number of bases of the query sequence that are 5′ and 3′ of the subject sequence, which are not matched/aligned, as a percent of the total bases of the query sequence. Whether a nucleotide is matched/aligned is determined by results of the FASTDB sequence alignment. This percentage is then subtracted from the percent identity, calculated by the above FASTDB program using the specified parameters, to arrive at a final percent identity score. This corrected score is what is used for the purposes of the present invention. Only bases outside the 5′ and 3′ bases of the subject sequence, as displayed by the FASTDB alignment, which are not matched/aligned with the query sequence, are calculated for the purposes of manually adjusting the percent identity score.

[0099] For example, a 90 base subject sequence is aligned to a 100 base query sequence to determine percent identity. The deletions occur at the 5′ end of the subject sequence and therefore, the FASTDB alignment does not show a matched/alignment of the first 10 bases at 5′ end. The 10 unpaired bases represent 10% of the sequence (number of bases at the 5′ and 3′ ends not matched/total number of bases in the query sequence) so 10% is subtracted from the percent identity score calculated by the FASTDB program. If the remaining 90 bases were perfectly matched the final percent identity would be 90%. In another example, a 90 base subject sequence is compared with a 100 base query sequence. This time the deletions are internal deletions so that there are no bases on the 5′ or 3′ of the subject sequence which are not matched/aligned with the query. In this case the percent identity calculated by FASTDB is not manually corrected. Once again, only bases 5′ and 3′ of the subject sequence which are not matched/aligned with the query sequence are manually corrected for. No other manual corrections are to be made for the purposes of the present invention.

[0100] By a polypeptide having an amino acid sequence at least, for example, 95% “identical” to a query amino acid sequence of the present invention, it is intended that the amino acid sequence of the subject polypeptide is identical to the query sequence except that the subject polypeptide sequence may include up to five amino acid alterations per each 100 amino acids of the query amino acid sequence. In other words, to obtain a polypeptide having an amino acid sequence at least 95% identical to a query amino acid sequence, up to 5% of the amino acid residues in the subject sequence may be inserted, deleted, (indels) or substituted with another amino acid. These alterations of the reference sequence may occur at the amino or carboxy terminal positions of the reference amino acid sequence or anywhere between those terminal positions, interspersed either individually among residues in the reference sequence or in one or more contiguous groups within the reference sequence.

[0101] As a practical matter, whether any particular polypeptide is at least 80%, 85%, 90%, 95%, 96%, 97%, 98% or 99% identical to, for instance, the amino acid sequence of a polypeptide referred to in Table 1A (e.g., an amino acid sequence identified in columns 5 or 6) or Table 2 (e.g., the amino acid sequence of the polypeptide encoded by the polynucleotide sequence defined in columns 8 and 9 of Table 2) or a fragment thereof, the amino acid sequence of the polypeptide encoded by the polynucleotide sequence in SEQ ID NO:B as defined in column 6 of Table 1B or a fragment thereof, the amino acid sequence of the polypeptide encoded by the nucleotide sequence in SEQ ID NO:X or a fragment thereof, or an amino acid sequence of the polypeptide encoded by cDNA contained in Clone ID NO:Z, or a fragment thereof, can be determined conventionally using known computer programs. A preferred method for determining the best overall match between a query sequence (a sequence of the present invention) and a subject sequence, also referred to as a global sequence alignment, can be determined using the FASTDB computer program based on the algorithm of Brutlag et al. (Comp. App. Biosci.6:237-245 (1990)). In a sequence alignment the query and subject sequences are either both nucleotide sequences or both amino acid sequences. The result of said global sequence alignment is expressed as percent identity. Preferred parameters used in a FASTDB amino acid alignment are: Matrix=PAM 0, k-tuple=2, Mismatch Penalty=1, Joining Penalty=20, Randomization Group Length=0, Cutoff Score=1, Window Size=sequence length, Gap Penalty=5, Gap Size Penalty=0.05, Window Size=500 or the length of the subject amino acid sequence, whichever is shorter.

[0102] If the subject sequence is shorter than the query sequence due to N- or C-terminal deletions, not because of internal deletions, a manual correction must be made to the results. This is because the FASTDB program does not account for N- and C-terminal truncations of the subject sequence when calculating global percent identity. For subject sequences truncated at the N- and C-termini, relative to the query sequence, the percent identity is corrected by calculating the number of residues of the query sequence that are N- and C-terminal of the subject sequence, which are not matched/aligned with a corresponding subject residue, as a percent of the total bases of the query sequence. Whether a residue is matched/aligned is determined by results of the FASTDB sequence alignment. This percentage is then subtracted from the percent identity, calculated by the above FASTDB program using the specified parameters, to arrive at a final percent identity score. This final percent identity score is what is used for the purposes of the present invention. Only residues to the N- and C-termini of the subject sequence, which are not matched/aligned with the query sequence, are considered for the purposes of manually adjusting the percent identity score. That is, only query residue positions outside the farthest N- and C-terminal residues of the subject sequence.

[0103] For example, a 90 amino acid residue subject sequence is aligned with a 100 residue query sequence to determine percent identity. The deletion occurs at the N-terminus of the subject sequence and therefore, the FASTDB alignment does not show a matching/alignment of the first 10 residues at the N-terminus. The 10 unpaired residues represent 10% of the sequence (number of residues at the N- and C-termini not matched/total number of residues in the query sequence) so 10% is subtracted from the percent identity score calculated by the FASTDB program. If the remaining 90 residues were perfectly matched the final percent identity would be 90%. In another example, a 90 residue subject sequence is compared with a 100 residue query sequence. This time the deletions are internal deletions so there are no residues at the N- or C-termini of the subject sequence which are not matched/aligned with the query. In this case the percent identity calculated by FASTDB is not manually corrected. Once again, only residue positions outside the N- and C-terminal ends of the subject sequence, as displayed in the FASTDB alignment, which are not matched/aligned with the query sequence are manually corrected for. No other manual corrections are to be made for the purposes of the present invention.

[0104] The polynucleotide variants of the invention may contain alterations in the coding regions, non-coding regions, or both. Especially preferred are polynucleotide variants containing alterations, which produce silent substitutions, additions, or deletions, but do not alter the properties or activities of the encoded polypeptide. Nucleotide variants produced by silent substitutions due to the degeneracy of the genetic code are preferred. Moreover, polypeptide variants in which less than 50, less than 40, less than 30, less than 20, less than 10, or 5-50, 5-25, 5-10, 1-5, or 1-2 amino acids are substituted, deleted, or added in any combination are also preferred. Polynucleotide variants can be produced for a variety of reasons, e.g., to optimize codon expression for a particular host (change codons in the human mRNA to those preferred by a bacterial host such as E. coli).

[0105] Naturally occurring variants are called “allelic variants,” and refer to one of several alternate forms of a gene occupying a given locus on a chromosome of an organism. (Genes II, Lewin, B., ed., John Wiley & Sons, New York (1985).) These allelic variants can vary at either the polynucleotide and/or polypeptide level and are included in the present invention. Alternatively, non-naturally occurring variants may be produced by mutagenesis techniques or by direct synthesis.

[0106] Using known methods of protein engineering and recombinant DNA technology, variants may be generated to improve or alter the characteristics of the polypeptides of the present invention. For instance, one or more amino acids can be deleted from the N-terminus or C-terminus of the polypeptides of the present invention without substantial loss of biological function. As an example, the authors of Ron et al., J. Biol. Chem. 268: 2984-2988 (1993), reported variant KGF proteins having heparin binding activity even after deleting 3, 8, or 27 amino-terminal amino acid residues. Similarly, Interferon gamma exhibited up to ten times higher activity after deleting 8-10 amino acid residues from the carboxy terminus of this protein. (Dobeli et al., J. Biotechnology 7:199-216 (1988).)

[0107] Moreover, ample evidence demonstrates that variants often retain a biological activity similar to that of the naturally occurring protein. For example, Gayle and coworkers (J. Biol. Chem. 268:22105-22111 (1993)) conducted extensive mutational analysis of human cytokine IL-1a. They used random mutagenesis to generate over 3,500 individual IL-1a mutants that averaged 2.5 amino acid changes per variant over the entire length of the molecule. Multiple mutations were examined at every possible amino acid position. The investigators found that “[m]ost of the molecule could be altered with little effect on either [binding or biological activity].” In fact, only 23 unique amino acid sequences, out of more than 3,500 nucleotide sequences examined, produced a protein that significantly differed in activity from wild-type.

[0108] Furthermore, even if deleting one or more amino acids from the N-terminus or C-terminus of a polypeptide results in modification or loss of one or more biological functions, other biological activities may still be retained. For example, the ability of a deletion variant to induce and/or to bind antibodies which recognize the secreted form will likely be retained when less than the majority of the residues of the secreted form are removed from the N-terminus or C-terminus. Whether a particular polypeptide lacking N- or C-terminal residues of a protein retains such immunogenic activities can readily be determined by routine methods described herein and otherwise known in the art.

[0109] Thus, the invention further includes polypeptide variants which show a functional activity (e.g., biological activity) of the polypeptides of the invention. Such variants include deletions, insertions, inversions, repeats, and substitutions selected according to general rules known in the art so as have little effect on activity.

[0110] The present application is directed to nucleic acid molecules at least 80%, 85%, 90%, 95%, 96%, 97%, 98%, 99% or 100% identical to the nucleic acid sequences disclosed herein, (e.g., encoding a polypeptide having the amino acid sequence of an N and/or C terminal deletion), irrespective of whether they encode a polypeptide having functional activity. This is because even where a particular nucleic acid molecule does not encode a polypeptide having functional activity, one of skill in the art would still know how to use the nucleic acid molecule, for instance, as a hybridization probe or a polymerase chain reaction (PCR) primer. Uses of the nucleic acid molecules of the present invention that do not encode a polypeptide having functional activity include, inter alia, (1) isolating a gene or allelic or splice variants thereof in a cDNA library; (2) in situ hybridization (e.g., “FISH”)to metaphase chromosomal spreads to provide precise chromosomal location of the gene, as described in Verma et al., Human Chromosomes: A Manual of Basic Techniques, Pergamon Press, New York (1988); (3) Northern Blot analysis for detecting mRNA expression in specific tissues (e.g., normal liver or diseased liver tissues); and (4) in situ hybridization (e.g., histochemistry) for detecting mRNA expression in specific tissues (e.g., normal liver or diseased liver tissues).

[0111] Preferred, however, are nucleic acid molecules having sequences at least 80%, 85%, 90%, 95%, 96%, 97%, 98%, 99% or 100% identical to the nucleic acid sequences disclosed herein, which do, in fact, encode a polypeptide having functional activity. By a polypeptide having “functional activity” is meant, a polypeptide capable of displaying one or more known functional activities associated with a full-length (complete) protein of the invention. Such functional activities include, but are not limited to, biological activity, antigenicity [ability to bind (or compete with a polypeptide of the invention for binding) to an anti-polypeptide of the invention antibody], immunogenicity (ability to generate antibody which binds to a specific polypeptide of the invention), ability to form multimers with polypeptides of the invention, and ability to bind to a receptor or ligand for a polypeptide of the invention.

[0112] The functional activity of the polypeptides, and fragments, variants and derivatives of the invention, can be assayed by various methods.

[0113] For example, in one embodiment where one is assaying for the ability to bind or compete with full-length polypeptide of the present invention for binding to an anti-polypeptide of the invention antibody, various immunoassays known in the art can be used, including but not limited to, competitive and non-competitive assay systems using techniques such as radioimmunoassays, ELISA (enzyme linked immunosorbent assay), “sandwich” immunoassays, immunoradiometric assays, gel diffusion precipitation reactions, immunodiffusion assays, in situ immunoassays (using colloidal gold, enzyme or radioisotope labels, for example), western blots, precipitation reactions, agglutination assays (e.g., gel agglutination assays, hemagglutination assays), complement fixation assays, immunofluorescence assays, protein A assays, and immunoelectrophoresis assays, etc. In one embodiment, antibody binding is detected by detecting a label on the primary antibody. In another embodiment, the primary antibody is detected by detecting binding of a secondary antibody or reagent to the primary antibody. In a further embodiment, the secondary antibody is labeled. Many means are known in the art for detecting binding in an immunoassay and are within the scope of the present invention.

[0114] In another embodiment, where a ligand is identified, or the ability of a polypeptide fragment, variant or derivative of the invention to multimerize is being evaluated, binding can be assayed, e.g., by means well-known in the art, such as, for example, reducing and non-reducing gel chromatography, protein affinity chromatography, and affinity blotting. See generally, Phizicky et al., Microbiol. Rev. 59:94-123 (1995). In another embodiment, the ability of physiological correlates of a polypeptide of the present invention to bind to a substrate(s) of the polypeptide of the invention can be routinely assayed using techniques known in the art.

[0115] In addition, assays described herein (see Examples) and otherwise known in the art may routinely be applied to measure the ability of polypeptides of the present invention and fragments, variants and derivatives thereof to elicit polypeptide related biological activity (either in vitro or in vivo). Other methods will be known to the skilled artisan and are within the scope of the invention.

[0116] Of course, due to the degeneracy of the genetic code, one of ordinary skill in the art will immediately recognize that a large number of the nucleic acid molecules having a sequence at least 80%, 85%, 90%, 95%, 96%, 97%, 98%, 99%, or 100% identical to, for example, the nucleic acid sequence of the cDNA contained in Clone ID NO:Z, a nucleic acid sequence referred to in Table 1A (e.g., SEQ ID NO:X), a nucleic acid sequence disclosed in Table 2 (e.g., the nucleic acid sequence delineated in columns 8 and 9) or fragments thereof, will encode polypeptides “having functional activity.” In fact, since degenerate variants of any of these nucleotide sequences all encode the same polypeptide, in many instances, this will be clear to the skilled artisan even without performing the above described comparison assay. It will be further recognized in the art that, for such nucleic acid molecules that are not degenerate variants, a reasonable number will also encode a polypeptide having functional activity. This is because the skilled artisan is fully aware of amino acid substitutions that are either less likely or not likely to significantly effect protein function (e.g., replacing one aliphatic amino acid with a second aliphatic amino acid), as further described below.

[0117] For example, guidance concerning how to make phenotypically silent amino acid substitutions is provided in Bowie et al., “Deciphering the Message in Protein Sequences: Tolerance to Amino Acid Substitutions,” Science 247:1306-1310 (1990), wherein the authors indicate that there are two main strategies for studying the tolerance of an amino acid sequence to change.

[0118] The first strategy exploits the tolerance of amino acid substitutions by natural selection during the process of evolution. By comparing amino acid sequences in different species, conserved amino acids can be identified. These conserved amino acids are likely important for protein function. In contrast, the amino acid positions where substitutions have been tolerated by natural selection indicates that these positions are not critical for protein function. Thus, positions tolerating amino acid substitution could be modified while still maintaining biological activity of the protein.

[0119] The second strategy uses genetic engineering to introduce amino acid changes at specific positions of a cloned gene to identify regions critical for protein function. For example, site directed mutagenesis or alanine-scanning mutagenesis (introduction of single alanine mutations at every residue in the molecule) can be used. See Cunningham et al., Science 244:1081-1085 (1989). The resulting mutant molecules can then be tested for biological activity.

[0120] As the authors state, these two strategies have revealed that proteins are surprisingly tolerant of amino acid substitutions. The authors further indicate which amino acid changes are likely to be permissive at certain amino acid positions in the protein. For example, most buried (within the tertiary structure of the protein) amino acid residues require nonpolar side chains, whereas few features of surface side chains are generally conserved. Moreover, tolerated conservative amino acid substitutions involve replacement of the aliphatic or hydrophobic amino acids Ala, Val, Leu and Ile; replacement of the hydroxyl residues Ser and Thr; replacement of the acidic residues Asp and Glu; replacement of the amide residues Asn and Gln, replacement of the basic residues Lys, Arg, and His; replacement of the aromatic residues Phe, Tyr, and Trp, and replacement of the small-sized amino acids Ala, Ser, Thr, Met, and Gly. Besides conservative amino acid substitutions, variants of the present invention include (i) substitutions with one or more of the non-conserved amino acid residues, where the substituted amino acid residues may or may not be one encoded by the genetic code, or (ii) substitutions with one or more of the amino acid residues having a substituent group, or (iii) fusion of the mature polypeptide with another compound, such as a compound to increase the stability and/or solubility of the polypeptide (for example, polyethylene glycol), or (iv) fusion of the polypeptide with additional amino acids, such as, for example, an IgG Fe fusion region peptide, serum albumin (preferably human serum albumin) or a fragment or variant thereof, or leader or secretory sequence, or a sequence facilitating purification. Such variant polypeptides are deemed to be within the scope of those skilled in the art from the teachings herein.

[0121] For example, polypeptide variants containing amino acid substitutions of charged amino acids with other charged or neutral amino acids may produce proteins with improved characteristics, such as less aggregation. Aggregation of pharmaceutical formulations both reduces activity and increases clearance due to the aggregate's immunogenic activity. See Pinckard et al., Clin. Exp. Immunol. 2:331-340 (1967); Robbins et al., Diabetes 36: 838-845 (1987); Cleland et al., Crit. Rev. Therapeutic Drug Carrier Systems 10:307-377 (1993).

[0122] A further embodiment of the invention relates to polypeptides which comprise the amino acid sequence of a polypeptide having an amino acid sequence which contains at least one amino acid substitution, but not more than 50 amino acid substitutions, even more preferably, not more than 40 amino acid substitutions, still more preferably, not more than 30 amino acid substitutions, and still even more preferably, not more than 20 amino acid substitutions from a polypeptide sequence disclosed herein. Of course it is highly preferable for a polypeptide to have an amino acid sequence which comprises the amino acid sequence of a polypeptide of SEQ ID NO:Y, an amino acid sequence encoded by SEQ ID NO:X, an amino acid sequence encoded by the portion of SEQ ID NO:X as defined in columns 8 and 9 of Table 2, an amino acid sequence encoded by the complement of SEQ ID NO:X, and/or the amino acid sequence encoded by cDNA contained in Clone ID NO:Z which contains, in order of ever-increasing preference, at least one, but not more than 10, 9, 8, 7, 6, 5, 4, 3, 2 or 1 amino acid substitutions.

[0123] In specific embodiments, the polypeptides of the invention comprise, or alternatively, consist of, fragments or variants of a reference amino acid sequence selected from: (a) the amino acid sequence of SEQ ID NO:Y or fragments thereof (e.g., the mature form and/or other fragments described herein); (b) the amino acid sequence encoded by SEQ ID NO:X or fragments thereof; (c) the amino acid sequence encoded by the complement of SEQ ID NO:X or fragments thereof; (d) the amino acid sequence encoded by the portion of SEQ ID NO:X as defined in columns 8 and 9 of Table 2 or fragments thereof; and (e) the amino acid sequence encoded by cDNA contained in Clone ID NO:Z or fragments thereof; wherein the fragments or variants have 1-5, 5-10, 5-25, 5-50, 10-50 or 50-150, amino acid residue additions, substitutions, and/or deletions when compared to the reference amino acid sequence. In preferred embodiments, the amino acid substitutions are conservative. Polynucleotides encoding these polypeptides are also encompassed by the invention.

### Polynucleotide and Polypeptide Fragments

[0124] The present invention is also directed to polynucleotide fragments of the polynucleotides (nucleic acids) of the invention. In the present invention, a “polynucleotide fragment” refers to a polynucleotide having a nucleic acid sequence which, for example: is a portion of the cDNA contained in Clone ID NO:Z or the complementary strand thereto; is a portion of the polynucleotide sequence encoding the polypeptide encoded by the cDNA contained in Clone ID NO:Z or the complementary strand thereto; is a portion of a polynucleotide sequence encoding the amino acid sequence encoded by the region of SEQ ID NO:X as defined in columns 8 and 9 of Table 2 or the complementary strand thereto; is a portion of the polynucleotide sequence of SEQ ID NO:X as defined in columns 8 and 9 of Table 2 or the complementary strand thereto; is a portion of the polynucleotide sequence in SEQ ID NO:X or the complementary strand thereto; is a polynucleotide sequence encoding a portion of the polypeptide of SEQ ID NO:Y; is a polynucleotide sequence encoding a portion of a polypeptide encoded by SEQ ID NO:X; is a polynucleotide sequence encoding a portion of a polypeptide encoded by the complement of the polynucleotide sequence in SEQ ID NO:X; is a portion of a polynucleotide sequence encoding the amino acid sequence encoded by the region of SEQ ID NO:B as defined in column 6 of Table 1B or the complementary strand thereto; or is a portion of the polynucleotide sequence of SEQ ID NO:B as defined in column 6 of Table 1B or the complementary strand thereto.

[0125] The polynucleotide fragments of the invention are preferably at least about 15 nt, and more preferably at least about 20 nt, still more preferably at least about 30 nt, and even more preferably, at least about 40 nt, at least about 50 nt, at least about 75 nt, or at least about 150 nt in length. A fragment “at least 20 nt in length,” for example, is intended to include 20 or more contiguous bases from the cDNA sequence contained in Clone ID NO:Z, or the nucleotide sequence shown in SEQ ID NO:X or the complementary stand thereto. In this context “about” includes the particularly recited value or a value larger or smaller by several (5, 4, 3, 2, or 1) nucleotides, at either terminus or at both termini. These nucleotide fragments have uses that include, but are not limited to, as diagnostic probes and primers as discussed herein. Of course, larger fragments (e.g., at least 160, 170, 180, 190, 200, 250, 500, 600, 1000, or 2000 nucleotides in length) are also encompassed by the invention.

[0126] Moreover, representative examples of polynucleotide fragments of the invention, comprise, or alternatively consist of, a sequence from about nucleotide number 1-50, 51-100, 101-150, 151-200, 201-250, 251-300, 301-350, 351-400, 401-450, 451-500, 501-550, 551-600, 651-700, 701-750, 751-800, 800-850, 851-900, 901-950, 951-1000, 1001-1050, 1051-1100, 1101-1150, 1151-1200, 1201-1250, 1251-1300, 1301-1350, 1351-1400, 1401-1450, 1451-1500, 1501-1550, 1551-1600, 1601-1650, 1651-1700, 1701-1750, 1751-1800, 1801-1850, 1851-1900, 1901-1950, 1951-2000, 2001-2050, 2051-2100, 2101-2150, 2151-2200, 2201-2250, 2251-2300, 2301-2350, 2351-2400, 2401-2450, 2451-2500, 2501-2550, 2551-2600, 2601-2650, 2651-2700, 2701-2750, 2751-2800, 2801-2850, 2851-2900, 2901-2950, 2951-3000, 3001-3050, 3051-3100, 3101-3150, 3151-3200, 3201-3250, 3251-3300, 3301-3350, 3351-3400, 3401-3450, 3451-3500, 3501-3550, 3551-3600, 3601-3650, 3651-3700, 3701-3750, 3751-3800, 3801-3850, 3851-3900, 3901-3950, 3951-4000, 4001-4050, 4051-4100, 4101-4150, 4151-4200, 4201-4250, 4251-4300, 4301-4350, 4351-4400, 4401-4450, 4451-4500, 4501-4550, 4551-4600, 4601-4650, 4651-4700, 4701-4750, 4751-4800, 4801-4850, 4851-4900, 4901-4950, 4951-5000, 5001-5050, 5051-5100, 5101-5150, 5151-5200, 5201-5250, 5251-5300, 5301-5350, 5351-5400, 5401-5450, 5451-5500, 5501-5550, 5551-5600, 5601-5650, 5651-5700, 5701-5750, 5751-5800, 5801-5850, 5851-5900, 5901-5950, 5951-6000, 6001-6050, 6051-6100, 6101-6150, 6151-6200, 6201-6250, 6251-6300, 6301-6350, 6351-6400, 6401-6450, 6451-6500, 6501-6550, 6551-6600, 6601-6650, 6651-6700, 6701-6750, 6751-6800, 6801-6850, 6851-6900, 6901-6950, 6951-7000, 7001-7050, 7051-7100, 7101-7150, 7151-7200, 7201-7250, 7251-7300 or 7301 to the end of SEQ ID NO:X, or the complementary strand thereto. In this context “about” includes the particularly recited range or a range larger or smaller by several (5, 4, 3, 2, or 1) nucleotides, at either terminus or at both termini. Preferably, these fragments encode a polypeptide, which has a functional activity (e.g., biological activity). More preferably, these polynucleotides can be used as probes or primers as discussed herein. Polynucleotides which hybridize to one or more of these polynucleotides under stringent hybridization conditions or alternatively, under lower stringency conditions are also encompassed by the invention, as are polypeptides encoded by these polynucleotides.

[0127] Further representative examples of polynucleotide fragments of the invention, comprise, or alternatively consist of, a sequence from about nucleotide number 1-50, 51-100, 101-150, 151-200, 201-250, 251-300, 301-350, 351-400, 401-450, 451-500, 501-550, 551-600, 651-700, 701-750, 751-800, 800-850, 851-900, 901-950, 951-1000, 1001-1050, 1051-1100, 1101-1150, 1151-1200, 1201-1250, 1251-1300, 1301-1350, 1351-1400, 1401-1450, 1451-1500, 1501-1550, 1551-1600, 1601-1650, 1651-1700, 1701-1750, 1751-1800, 1801-1850, 1851-1900, 1901-1950, 1951-2000, 2001-2050, 2051-2100, 2101-2150, 2151-2200, 2201-2250, 2251-2300, 2301-2350, 2351-2400, 2401-2450, 2451-2500, 2501-2550, 2551-2600, 2601-2650, 2651-2700, 2701-2750, 2751-2800, 2801-2850, 2851-2900, 2901-2950, 2951-3000, 3001-3050, 3051-3100, 3101-3150, 3151-3200, 3201-3250, 3251-3300, 3301-3350, 3351-3400, 3401-3450, 3451-3500, 3501-3550, 3551-3600, 3601-3650, 3651-3700, 3701-3750, 3751-3800, 3801-3850, 3851-3900, 3901-3950, 3951-4000, 4001-4050, 4051-4100, 4101-4150, 4151-4200, 4201-4250, 4251-4300, 4301-4350, 4351-4400, 4401-4450, 4451-4500, 4501-4550, 4551-4600, 4601-4650, 4651-4700, 4701-4750, 4751-4800, 4801-4850, 4851-4900, 4901-4950, 4951-5000, 5001-5050, 5051-5100, 5101-5150, 5151-5200, 5201-5250, 5251-5300, 5301-5350, 5351-5400, 5401-5450, 5451-5500, 5501-5550, 5551-5600, 5601-5650, 5651-5700, 5701-5750, 5751-5800, 5801-5850, 5851-5900, 5901-5950, 5951-6000, 6001-6050, 6051-6100, 6101-6150, 6151-6200, 6201-6250, 6251-6300, 6301-6350, 6351-6400, 6401-6450, 6451-6500, 6501-6550, 6551-6600, 6601-6650, 6651-6700, 6701-6750, 6751-6800, 6801-6850, 6851-6900, 6901-6950, 6951-7000, 7001-7050, 7051-7100, 7101-7150, 7151-7200, 7201-7250, 7251-7300 or 7301 to the end of the cDNA sequence contained in Clone ID NO:Z, or the complementary strand thereto. In this context “about” includes the particularly recited range or a range larger or smaller by several (5, 4, 3, 2, or 1) nucleotides, at either terminus or at both termini. Preferably, these fragments encode a polypeptide, which has a functional activity (e.g., biological activity). More preferably, these polynucleotides can be used as probes or primers as discussed herein. Polynucleotides which hybridize to one or more of these polynucleotides under stringent hybridization conditions or alternatively, under lower stringency conditions are also encompassed by the invention, as are polypeptides encoded by these polynucleotides.

[0128] Moreover, representative examples of polynucleotide fragments of the invention comprise, or alternatively consist of, a nucleic acid sequence comprising one, two, three, four, five, six, seven, eight, nine, ten, or more of the above described polynucleotide fragments of the invention in combination with a polynucleotide sequence delineated in Table 1B column 6. Additional, representative examples of polynucleotide fragments of the invention comprise, or alternatively consist of, a nucleic acid sequence comprising one, two, three, four, five, six, seven, eight, nine, ten, or more of the above described polynucleotide fragments of the invention in combination with a polynucleotide sequence that is the complementary strand of a sequence delineated in column 6 of Table 1B. In further embodiments, the above-described polynucleotide fragments of the invention comprise, or alternatively consist of, sequences delineated in Table 1B, column 6, and have a nucleic acid sequence which is different from that of the BAC fragment having the sequence disclosed in SEQ ID NO:B (see Table 1B, column 5). In additional embodiments, the above-described polynucleotide fragments of the invention comprise, or alternatively consist of, sequences delineated in Table 1B, column 6, and have a nucleic acid sequence which is different from that published for the BAC clone identified as BAC ID NO:A (see Table 1B, column 4). In additional embodiments, the above-described polynucleotides of the invention comprise, or alternatively consist of, sequences delineated Table 1B, column 6, and have a nucleic acid sequence which is different from that contained in the BAC clone identified as BAC ID NO:A (see Table 1B, column 4). Polypeptides encoded by these polynucleotides, other polynucleotides that encode these polypeptides, and antibodies that bind these polypeptides are also encompassed by the invention. Additionally, fragments and variants of the above-described polynucleotides and polypeptides are also encompassed by the invention.

[0129] In additional specific embodiments, polynucleotides of the invention comprise, or alternatively consist of, one, two, three, four, five, six, seven, eight, nine, ten, or more fragments of the sequences delineated in column 6 of Table 1B, and the polynucleotide sequence of SEQ ID NO:X (e.g., as defined in Table 1B, column 2) or fragments or variants thereof. Polypeptides encoded by these polynucleotides, other polynucleotides that encode these polypeptides, and antibodies that bind these polypeptides are also encompassed by the invention.

[0130] In additional specific embodiments, polynucleotides of the invention comprise, or alternatively consist of, one, two, three, four, five, six, seven, eight, nine, ten, or more fragments of the sequences delineated in column 6 of Table 1B which correspond to the same Clone ID NO:Z (see Table 1B, column 1), and the polynucleotide sequence of SEQ ID NO:X (e.g., as defined in Table 1A or 1B) or fragments or variants thereof. Polypeptides encoded by these polynucleotides, other polynucleotides that encode these polypeptides, and antibodies that bind these polypeptides are also encompassed by the invention.

[0131] In further specific embodiments, polynucleotides of the invention comprise, or alternatively consist of, one, two, three, four, five, six, seven, eight, nine, ten, or more fragments of the sequences delineated in the same row of column 6 of Table 1B, and the polynucleotide sequence of SEQ ID NO:X (e.g., as defined in Table 1A or 1B) or fragments or variants thereof. Polypeptides encoded by these polynucleotides, other polynucleotides that encode these polypeptides, and antibodies that bind these polypeptides are also encompassed by the invention.

[0132] In additional specific embodiments, polynucleotides of the invention comprise, or alternatively consist of a polynucleotide sequence in which the 3′ 10 polynucleotides of one of the sequences delineated in column 6 of Table 1B and the 5′ 10 polynucleotides of the sequence of SEQ ID NO:X are directly contiguous. Nucleic acids which hybridize to the complement of these 20 contiguous polynucleotides under stringent hybridization conditions or alternatively, under lower stringency conditions, are also encompassed by the invention. Polypeptides encoded by these polynucleotides and/or nucleic acids, other polynucleotides and/or nucleic acids that encode these polypeptides, and antibodies that bind these polypeptides are also encompassed by the invention. Additionally, fragments and variants of the above-described polynucleotides, nucleic acids, and polypeptides are also encompassed by the invention.

[0133] In additional specific embodiments, polynucleotides of the invention comprise, or alternatively consist of a polynucleotide sequence in which the 3′ 10 polynucleotides of one of the sequences delineated in column 6 of Table 1B and the 5′ 10 polynucleotides of a fragment or variant of the sequence of SEQ ID NO:X (e.g., as described herein) are directly contiguous Nucleic acids which hybridize to the complement of these 20 contiguous polynucleotides under stringent hybridization conditions or alternatively, under lower stringency conditions, are also encompassed by the invention. Polypeptides encoded by these polynucleotides and/or nucleic acids, other polynucleotides and/or nucleic acids encoding these polypeptides, and antibodies that bind these polypeptides are also encompassed by the invention. Additionally, fragments and variants of the above-described polynucleotides, nucleic acids, and polypeptides are also encompassed by the invention.

[0134] In further specific embodiments, polynucleotides of the invention comprise, or alternatively consist of a polynucleotide sequence in which the 3′ 10 polynucleotides of a fragment or variant of the sequence of SEQ ID NO:X and the 5′ 10 polynucleotides of the sequence of one of the sequences delineated in column 6 of Table 1B are directly contiguous. Nucleic acids which hybridize to the complement of these 20 contiguous polynucleotides under stringent hybridization conditions or alternatively, under lower stringency conditions, are also encompassed by the invention. Polypeptides encoded by these polynucleotides and/or nucleic acids, other polynucleotides and/or nucleic acids encoding these polypeptides, and antibodies that bind these polypeptides are also encompassed by the invention. Additionally, fragments and variants of the above-described polynucleotides, nucleic acids, and polypeptides are also encompassed by the invention.

[0135] In specific embodiments, polynucleotides of the invention comprise, or alternatively consist of a polynucleotide sequence in which the 3′ 10 polynucleotides of one of the sequences delineated in column 6 of Table 1B and the 5′ 10 polynucleotides of another sequence in column 6 are directly contiguous. In preferred embodiments, the 3′ 10 polynucleotides of one of the sequences delineated in column 6 of Table 1B is directly contiguous with the 5′ 10 polynucleotides of the next sequential exon delineated in Table 1B, column 6. Nucleic acids which hybridize to the complement of these 20 contiguous polynucleotides under stringent hybridization conditions or alternatively, under lower stringency conditions, are also encompassed by the invention. Polypeptides encoded by these polynucleotides and/or nucleic acids, other polynucleotides and/or nucleic acids encoding these polypeptides, and antibodies that bind these polypeptides are also encompassed by the invention. Additionally, fragments and variants of the above-described polynucleotides, nucleic acids, and polypeptides are also encompassed by the invention.

[0136] In the present invention, a “polypeptide fragment” refers to an amino acid sequence which is a portion of that contained in SEQ ID NO:Y, a portion of an amino acid sequence encoded by the portion of SEQ ID NO:X as defined in columns 8 and 9 of Table 2, a portion of an amino acid sequence encoded by the polynucleotide sequence of SEQ ID NO:X, a portion of an amino acid sequence encoded by the complement of the polynucleotide sequence in SEQ ID NO:X, and/or a portion of an amino acid sequence encoded by the cDNA contained in Clone ID NO:Z. Protein (polypeptide) fragments may be “free-standing,” or comprised within a larger polypeptide of which the fragment forms a part or region, most preferably as a single continuous region. Representative examples of polypeptide fragments of the invention, include, for example, fragments comprising, or alternatively consisting of, from about amino acid number 1-20, 21-40, 41-60, 61-80, 81-100, 102-120, 121-140, 141-160, 161-180, 181-200, 201-220, 221-240, 241-260, 261-280, 281-300, 301-320, 321-340, 341-360, 361-380, 381-400, 401-420, 421-440, 441-460, 461-480, 481-500, 501-520, 521-540, 541-560, 561-580, 581-600, 601-620, 621-640, 641-660, 661-680, 681-700, 701-720, 721-740, 741-760, 761-780, 781-800, 801-820, 821-840, 841-860, 861-880, 881-900, 901-920, 921-940, 941-960, 961-980, 981-1000, 1001-1020, 1021-1040, 1041-1060, 1061-1080, 1081-1100, 1101-1120, 1121-1140, 1141-1160, 1161-1180, 1181-1200, 1201-1220, 1221-1240, 1241-1260, 1261-1280, 1281-1300, 1301-1320, 1321-1340, 1341-1360, 1361-1380, 1381-1400, 1401-1420, 1421-1440, or 1441 to the end of the coding region. In a preferred embodiment, polypeptide fragments of the invention include, for example, fragments comprising, or alternatively consisting of, from about amino acid number 1-20, 21-40, 41-60, 61-80, 81-100, 102-120, 121-140, 141-160, 161-180, 181-200, 201-220, 221-240, 241-260, 261-280, 281-300, 301-320, 321-340, 341-360, 361-380, 381-400, 401-420, 421-440, 441-460, 461-480, 481-500, 501-520, 521-540, 541-560, 561-580, 581-600, 601-620, 621-640, 641-660, 661-680, 681-700, 701-720, 721-740, 741-760, 761-780, 781-800, 801-820, 821-840, 841-860, 861-880, 881-900, 901-920, 921-940, 941-960, 961-980, 981-1000, 1001-1020, 1021-1040, 1041-1060, 1061-1080, 1081-1100, 1101-1120, 1121-1140, 1141-1160, 1161-1180, 1181-1200, 1201-1220, 1221-1240, 1241-1260, 1261-1280, 1281-1300, 1301-1320, 1321-1340, 1341-1360, 1361-1380, 1381-1400, 1401-1420, 1421-1440, or 1441 to the end of the coding region of SEQ ID NO:Y. Moreover, polypeptide fragments of the invention may be at least about 10, 15, 20, 25, 30, 35, 40, 45, 50, 55, 60, 65, 70, 75, 80, 85, 90, 100, 110, 120, 130, 140, or 150 amino acids in length. In this context “about” includes the particularly recited ranges or values, or ranges or values larger or smaller by several (5, 4, 3, 2, or 1) amino acids, at either extreme or at both extremes. Polynucleotides encoding these polypeptide fragments are also encompassed by the invention.

[0137] Even if deletion of one or more amino acids from the N-terminus of a protein results in modification of loss of one or more biological functions of the protein, other functional activities (e.g., biological activities, ability to multimerize, ability to bind a ligand) may still be retained. For example, the ability of shortened muteins to induce and/or bind to antibodies which recognize the complete or mature forms of the polypeptides generally will be retained when less than the majority of the residues of the complete or mature polypeptide are removed from the N-terminus. Whether a particular polypeptide lacking N-terminal residues of a complete polypeptide retains such immunologic activities can readily be determined by routine methods described herein and otherwise known in the art. It is not unlikely that a mutein with a large number of deleted N-terminal amino acid residues may retain some biological or immunogenic activities. In fact, peptides composed of as few as six amino acid residues may often evoke an immune response.

[0138] Accordingly, polypeptide fragments include the secreted protein as well as the mature form. Further preferred polypeptide fragments include the secreted protein or the mature form having a continuous series of deleted residues from the amino or the carboxy terminus, or both. For example, any number of amino acids, ranging from 1-60, can be deleted from the amino terminus of either the secreted polypeptide or the mature form. Similarly, any number of amino acids, ranging from 1-30, can be deleted from the carboxy terminus of the secreted protein or mature form. Furthermore, any combination of the above amino and carboxy terminus deletions is preferred. Similarly, polynucleotides encoding these polypeptide fragments are also preferred.

[0139] The present invention further provides polypeptides having one or more residues deleted from the amino terminus of the amino acid sequence of a polypeptide disclosed herein (e.g., a polypeptide of SEQ ID NO:Y, a polypeptide encoded by the polynucleotide sequence contained in SEQ ID NO:X or the complement thereof, a polypeptide encoded by the portion of SEQ ID NO:X as defined in columns 8 and 9 of Table 2, a polypeptide encoded by the portion of SEQ ID NO:B as defined in column 6 of Table 1B, and/or a polypeptide encoded by the cDNA contained in Clone ID NO:Z). In particular, N-terminal deletions may be described by the general formula m-q, where q is a whole integer representing the total number of amino acid residues in a polypeptide of the invention (e.g., the polypeptide disclosed in SEQ ID NO:Y, or the polypeptide encoded by the portion of SEQ ID NO:X as defined in columns 8 and 9 of Table 2), and m is defined as any integer ranging from 2 to q-6. Polynucleotides encoding these polypeptides are also encompassed by the invention.

[0140] The present invention further provides polypeptides having one or more residues from the carboxy terminus of the amino acid sequence of a polypeptide disclosed herein (e.g., a polypeptide of SEQ ID NO:Y, a polypeptide encoded by the polynucleotide sequence contained in SEQ ID NO:X, a polypeptide encoded by the portion of SEQ ID NO:X as defined in columns 8 and 9 of Table 2, and/or a polypeptide encoded by the cDNA contained in Clone ID NO:Z). In particular, C-terminal deletions may be described by the general formula 1-n, where n is any whole integer ranging from 6 to q-1, and where n corresponds to the position of amino acid residue in a polypeptide of the invention. Polynucleotides encoding these polypeptides are also encompassed by the invention.

[0141] In addition, any of the above described N- or C-terminal deletions can be combined to produce a N- and C-terminal deleted polypeptide. The invention also provides polypeptides having one or more amino acids deleted from both the amino and the carboxyl termini, which may be described generally as having residues m-n of a polypeptide encoded by SEQ ID NO:X (e.g., including, but not limited to, the preferred polypeptide disclosed as SEQ ID NO:Y and the polypeptide encoded by the portion of SEQ ID NO:X as defined in columns 8 and 9 of Table 2), the cDNA contained in Clone ID NO:Z, and/or the complement thereof, where n and m are integers as described above. Polynucleotides encoding these polypeptides are also encompassed by the invention.

[0142] Also as mentioned above, even if deletion of one or more amino acids from the C-terminus of a protein results in modification of loss of one or more biological functions of the protein, other functional activities (e.g., biological activities, ability to multimerize, ability to bind a ligand) may still be retained. For example the ability of the shortened mutein to induce and/or bind to antibodies which recognize the complete or mature forms of the polypeptide generally will be retained when less than the majority of the residues of the complete or mature polypeptide are removed from the C-terminus. Whether a particular polypeptide lacking C-terminal residues of a complete polypeptide retains such immunologic activities can readily be determined by routine methods described herein and otherwise known in the art. It is not unlikely that a mutein with a large number of deleted C-terminal amino acid residues may retain some biological or immunogenic activities. In fact, peptides composed of as few as six amino acid residues may often evoke an immune response.

[0143] The present application is also directed to proteins containing polypeptides at least 80%, 85%, 90%, 95%, 96%, 97%, 98% or 99% identical to a polypeptide sequence set forth herein. In preferred embodiments, the application is directed to proteins containing polypeptides at least 80%, 85%, 90%, 95%, 96%, 97%, 98% or 99% identical to polypeptides having the amino acid sequence of the specific N- and C-terminal deletions. Polynucleotides encoding these polypeptides are also encompassed by the invention.

[0144] Any polypeptide sequence encoded by, for example, the polynucleotide sequences set forth as SEQ ID NO:X or the complement thereof, (presented, for example, in Tables 1A and 2), the cDNA contained in Clone ID NO:Z, or the polynucleotide sequence as defined in column 6 of Table 1B, may be analyzed to determine certain preferred regions of the polypeptide. For example, the amino acid sequence of a polypeptide encoded by a polynucleotide sequence of SEQ ID NO:X (e.g., the polypeptide of SEQ ID NO:Y and the polypeptide encoded by the portion of SEQ ID NO:X as defined in columns 8 and 9 of Table 2) or the cDNA contained in Clone ID NO:Z may be analyzed using the default parameters of the DNASTAR computer algorithm (DNASTAR, Inc., 1228 S. Park St., Madison, Wis. 53715 USA; http://www.dnastar.com/).

[0145] Polypeptide regions that may be routinely obtained using the DNASTAR computer algorithm include, but are not limited to, Garnier-Robson alpha-regions, beta-regions, turn-regions, and coil-regions; Chou-Fasman alpha-regions, beta-regions, and turn-regions; Kyte-Doolittle hydrophilic regions and hydrophobic regions; Eisenberg alpha- and beta-amphipathic regions; Karplus-Schulz flexible regions; Emini surface-forming regions; and Jameson-Wolf regions of high antigenic index. Among highly preferred polynucleotides of the invention in this regard are those that encode polypeptides comprising regions that combine several structural features, such as several (e.g., 1, 2, 3 or 4) of the features set out above.

[0146] Additionally, Kyte-Doolittle hydrophilic regions and hydrophobic regions, Emini surface-forming regions, and Jameson-Wolf regions of high antigenic index (i.e., containing four or more contiguous amino acids having an antigenic index of greater than or equal to 1.5, as identified using the default parameters of the Jameson-Wolf program) can routinely be used to determine polypeptide regions that exhibit a high degree of potential for antigenicity. Regions of high antigenicity are determined from data by DNASTAR analysis by choosing values which represent regions of the polypeptide which are likely to be exposed on the surface of the polypeptide in an environment in which antigen recognition may occur in the process of initiation of an immune response.

[0147] Preferred polypeptide fragments of the invention are fragments comprising, or alternatively, consisting of, an amino acid sequence that displays a functional activity (e.g. biological activity) of the polypeptide sequence of which the amino acid sequence is a fragment. By a polypeptide displaying a “functional activity” is meant a polypeptide capable of one or more known functional activities associated with a full-length protein, such as, for example, biological activity, antigenicity, immunogenicity, and/or multimerization, as described herein.

[0148] Other preferred polypeptide fragments are biologically active fragments. Biologically active fragments are those exhibiting activity similar, but not necessarily identical, to an activity of the polypeptide of the present invention. The biological activity of the fragments may include an improved desired activity, or a decreased undesirable activity.

[0149] In preferred embodiments, polypeptides of the invention comprise, or alternatively consist of, one, two, three, four, five or more of the antigenic fragments of the polypeptide of SEQ ID NO:Y, or portions thereof. Polynucleotides encoding these polypeptides are also encompassed by the invention.

[0150] The present invention encompasses polypeptides comprising, or alternatively consisting of, an epitope of: the polypeptide sequence shown in SEQ ID NO:Y; a polypeptide sequence encoded by SEQ ID NO:X or the complementary strand thereto; the polypeptide sequence encoded by the portion of SEQ ID NO:X as defined in columns 8 and 9 of Table 2; the polypeptide sequence encoded by the portion of SEQ ID NO:B as defined in column 6 of Table 1B or the complement thereto; the polypeptide sequence encoded by the cDNA contained in Clone ID NO:Z; or the polypeptide sequence encoded by a polynucleotide that hybridizes to the sequence of SEQ ID NO:X, the complement of the sequence of SEQ ID NO:X, the complement of a portion of SEQ ID NO:X as defined in columns 8 and 9 of Table 2, or the cDNA sequence contained in Clone ID NO:Z under stringent hybridization conditions or alternatively, under lower stringency hybridization as defined supra. The present invention further encompasses polynucleotide sequences encoding an epitope of a polypeptide sequence of the invention (such as, for example, the sequence disclosed in SEQ ID NO:X, or a fragment thereof), polynucleotide sequences of the complementary strand of a polynucleotide sequence encoding an epitope of the invention, and polynucleotide sequences which hybridize to the complementary strand under stringent hybridization conditions or alternatively, under lower stringency hybridization conditions defined supra.

[0151] The term “epitopes,” as used herein, refers to portions of a polypeptide having antigenic or immunogenic activity in an animal, preferably a mammal, and most preferably in a human. In a preferred embodiment, the present invention encompasses a polypeptide comprising an epitope, as well as the polynucleotide encoding this polypeptide. An “immunogenic epitope,” as used herein, is defined as a portion of a protein that elicits an antibody response in an animal, as determined by any method known in the art, for example, by the methods for generating antibodies described infra. (See, for example, Geysen et al., Proc. Natl. Acad. Sci. USA 81:3998-4002 (1983)). The term “antigenic epitope,” as used herein, is defined as a portion of a protein to which an antibody can immunospecifically bind its antigen as determined by any method well known in the art, for example, by the immunoassays described herein. Immunospecific binding excludes non-specific binding but does not necessarily exclude cross-reactivity with other antigens. Antigenic epitopes need not necessarily be immunogenic.

[0152] Fragments, which function as epitopes may be produced by any conventional means. (See, e.g., Houghten, R. A., Proc. Natl. Acad. Sci. USA 82:5131-5135 (1985) further described in U.S. Pat. No. 4,631,211.)

[0153] In the present invention, antigenic epitopes preferably contain a sequence of at least 4, at least 5, at least 6, at least 7, more preferably at least 8, at least 9, at least 10, at least 11, at least 12, at least 13, at least 14, at least 15, at least 20, at least 25, at least 30, at least 40, at least 50, and, most preferably, between about 15 to about 30 amino acids. Preferred polypeptides comprising immunogenic or antigenic epitopes are at least 10, 15, 20, 25, 30, 35, 40, 45, 50, 55, 60, 65, 70, 75, 80, 85, 90, 95, or 100 amino acid residues in length. Additional non-exclusive preferred antigenic epitopes include the antigenic epitopes disclosed herein, as well as portions thereof. Antigenic epitopes are useful, for example, to raise antibodies, including monoclonal antibodies, that specifically bind the epitope. Preferred antigenic epitopes include the antigenic epitopes disclosed herein, as well as any combination of two, three, four, five or more of these antigenic epitopes. Antigenic epitopes can be used as the target molecules in immunoassays. (See, for instance, Wilson et al., Cell 37:767-778 (1984); Sutcliffe et al., Science 219:660-666 (1983)).

[0154] Non-limiting examples of epitopes of polypeptides that can be used to generate antibodies of the invention include a polypeptide comprising, or alternatively consisting of, at least one, two, three, four, five, six or more of the portion(s) of SEQ ID NO:Y specified in column 6 of Table 1A. These polypeptide fragments have been determined to bear antigenic epitopes of the proteins of the invention by the analysis of the Jameson-Wolf antigenic index, which is included in the DNAStar suite of computer programs. By “comprise” it is intended that a polypeptide contains at least one, two, three, four, five, six or more of the portion(s) of SEQ ID NO:Y shown in column 6 of Table 1A, but it may contain additional flanking residues on either the amino or carboxyl termini of the recited portion. Such additional flanking sequences are preferably sequences naturally found adjacent to the portion; i.e., contiguous sequence shown in SEQ ID NO:Y. The flanking sequence may, however, be sequences from a heterolgous polypeptide, such as from another protein described herein or from a heterologous polypeptide not described herein. In particular embodiments, epitope portions of a polypeptide of the invention comprise one, two, three, or more of the portions of SEQ ID NO:Y shown in column 6 of Table 1A. Polynucleotides encoding these polypeptides are also encompassed by the invention.

[0155] Similarly, immunogenic epitopes can be used, for example, to induce antibodies according to methods well known in the art. See, for instance, Sutcliffe et al., supra; Wilson et al., supra; Chow et al., Proc. Natl. Acad. Sci. USA 82:910-914; and Bittle et al., J. Gen. Virol. 66:2347-2354 (1985). Preferred immunogenic epitopes include the immunogenic epitopes disclosed herein, as well as any combination of two, three, four, five or more of these immunogenic epitopes. The polypeptides comprising one or more immunogenic epitopes may be presented for eliciting an antibody response together with a carrier protein, such as an albumin, to an animal system (such as rabbit or mouse), or, if the polypeptide is of sufficient length (at least about 25 amino acids), the polypeptide may be presented without a carrier. However, immunogenic epitopes comprising as few as 8 to 10 amino acids have been shown to be sufficient to raise antibodies capable of binding to, at the very least, linear epitopes in a denatured polypeptide (e.g., in Western blotting).

[0156] Epitope-bearing polypeptides of the present invention may be used to induce antibodies according to methods well known in the art including, but not limited to, in vivo immunization, in vitro immunization, and phage display methods. See, e.g., Sutcliffe et al., supra; Wilson et al., supra, and Bittle et al., J. Gen. Virol., 66:2347-2354 (1985). If in vivo immunization is used, animals may be immunized with free peptide; however, anti-peptide antibody titer may be boosted by coupling the peptide to a macromolecular carrier, such as keyhole limpet hemacyanin (KLH) or tetanus toxoid. For instance, peptides containing cysteine residues may be coupled to a carrier using a linker such as maleimidobenzoyl- N-hydroxysuccinimide ester (MBS), while other peptides may be coupled to carriers using a more general linking agent such as glutaraldehyde. Animals such as rabbits, rats and mice are immunized with either free or carrier- coupled peptides, for instance, by intraperitoneal and/or intradermal injection of emulsions containing about 100 μg of peptide or carrier protein and Freund's adjuvant or any other adjuvant known for stimulating an immune response. Several booster injections may be needed, for instance, at intervals of about two weeks, to provide a useful titer of anti-peptide antibody which can be detected, for example, by ELISA assay using free peptide adsorbed to a solid surface. The titer of anti-peptide antibodies in serum from an immunized animal may be increased by selection of anti-peptide antibodies, for instance, by adsorption to the peptide on a solid support and elution of the selected antibodies according to methods well known in the art.

[0157] As one of skill in the art will appreciate, and as discussed above, the polypeptides of the present invention (e.g., those comprising an immunogenic or antigenic epitope) can be fused to heterologous polypeptide sequences. For example, polypeptides of the present invention (including fragments or variants thereof), may be fused with the constant domain of immunoglobulins (IgA, IgE, IgG, IgM), or portions thereof (CH1, CH2, CH3, or any combination thereof and portions thereof, resulting in chimeric polypeptides. By way of another non-limiting example, polypeptides and/or antibodies of the present invention (including fragments or variants thereof) may be fused with albumin (including but not limited to recombinant human serum albumin or fragments or variants thereof (see, e.g., U.S. Pat. No. 5,876,969, issued Mar. 2, 1999, EP Patent 0 413 622, and U.S. Pat. No. 5,766,883, issued Jun. 16, 1998, herein incorporated by reference in their entirety)). In a preferred embodiment, polypeptides and/or antibodies of the present invention (including fragments or variants thereof) are fused with the mature form of human serum albumin (i.e., amino acids 1 -585 of human serum albumin as shown in FIGS.1 and 2 of EP Patent 0 322 094) which is herein incorporated by reference in its entirety. In another preferred embodiment, polypeptides and/or antibodies of the present invention (including fragments or variants thereof) are fused with polypeptide fragments comprising, or alternatively consisting of, amino acid residues 1-z of human serum albumin, where z is an integer from 369 to 419, as described in U.S. Pat. No. 5,766,883 herein incorporated by reference in its entirety. Polypeptides and/or antibodies of the present invention (including fragments or variants thereof) may be fused to either the N- or C-terminal end of the heterologous protein (e.g., immunoglobulin Fc polypeptide or human serum albumin polypeptide). Polynucleotides encoding fusion proteins of the invention are also encompassed by the invention.

[0158] Such fusion proteins as those described above may facilitate purification and may increase half-life in vivo. This has been shown for chimeric proteins consisting of the first two domains of the human CD4-polypeptide and various domains of the constant regions of the heavy or light chains of mammalian immunoglobulins. See, e.g., EP 394,827; Traunecker et al., Nature, 331:84-86 (1988). Enhanced delivery of an antigen across the epithelial barrier to the immune system has been demonstrated for antigens (e.g., insulin) conjugated to an FcRn binding partner such as IgG or Fe fragments (see, e.g., PCT Publications WO 96/22024 and WO 99/04813). IgG Fusion proteins that have a disulfide-linked dimeric structure due to the IgG portion desulfide bonds have also been found to be more efficient in binding and neutralizing other molecules than monomeric polypeptides or fragments thereof alone. See, e.g., Fountoulakis et al., J. Biochem., 270:3958-3964 (1995). Nucleic acids encoding the above epitopes can also be recombined with a gene of interest as an epitope tag (e.g., the hemagglutinin (HA) tag or flag tag) to aid in detection and purification of the expressed polypeptide. For example, a system described by Janknecht et al. allows for the ready purification of non-denatured fusion proteins expressed in human cell lines (Janknecht et al., 1991, Proc. Natl. Acad. Sci. USA 88:8972-897). In this system, the gene of interest is subcloned into a vaccinia recombination plasmid such that the open reading frame of the gene is translationally fused to an amino-terminal tag consisting of six histidine residues. The tag serves as a matrix binding domain for the fusion protein. Extracts from cells infected with the recombinant vaccinia virus are loaded onto Ni2+ nitriloacetic acid-agarose column and histidine-tagged proteins can be selectively eluted with imidazole-containing buffers.

### Fusion Proteins

[0159] Any polypeptide of the present invention can be used to generate fusion proteins. For example, the polypeptide of the present invention, when fused to a second protein, can be used as an antigenic tag. Antibodies raised against the polypeptide of the present invention can be used to indirectly detect the second protein by binding to the polypeptide. Moreover, because secreted proteins target cellular locations based on trafficking signals, polypeptides of the present invention which are shown to be secreted can be used as targeting molecules once fused to other proteins.

[0160] Examples of domains that can be fused to polypeptides of the present invention include not only heterologous signal sequences, but also other heterologous functional regions. The fusion does not necessarily need to be direct, but may occur through linker sequences.

[0161] In certain preferred embodiments, proteins of the invention are fusion proteins comprising an amino acid sequence that is an N and/or C-terminal deletion of a polypeptide of the invention. In preferred embodiments, the invention is directed to a fusion protein comprising an amino acid sequence that is at least 80%, 85%, 90%, 95%, 96%, 97%, 98% or 99% identical to a polypeptide sequence of the invention. Polynucleotides encoding these proteins are also encompassed by the invention. Moreover, fusion proteins may also be engineered to improve characteristics of the polypeptide of the present invention. For instance, a region of additional amino acids, particularly charged amino acids, may be added to the N-terminus of the polypeptide to improve stability and persistence during purification from the host cell or subsequent handling and storage. Also, peptide moieties may be added to the polypeptide to facilitate purification. Such regions may be removed prior to final preparation of the polypeptide. The addition of peptide moieties to facilitate handling of polypeptides is familiar and routine techniques in the art.

[0162] As one of skill in the art will appreciate that, as discussed above, polypeptides of the present invention, and epitope-bearing fragments thereof, can be combined with heterologous polypeptide sequences. For example, the polypeptides of the present invention may be fused with heterologous polypeptide sequences, for example, the polypeptides of the present invention may be fused with the constant domain of immunoglobulins (IgA, IgE, IgG, IgM) or portions thereof (CH1, CH2, CH3, and any combination thereof, including both entire domains and portions thereof), or albumin (including, but not limited to, native or recombinant human albumin or fragments or variants thereof (see, e.g., U.S. Pat. No. 5,876,969, issued Mar. 2, 1999, EP Patent 0 413 622, and U.S. Pat. No. 5,766,883, issued Jun. 16, 1998, herein incorporated by reference in their entirety)), resulting in chimeric polypeptides. For example, EP-A-O 464 533 (Canadian counterpart 2045869) discloses fusion proteins comprising various portions of constant region of immunoglobulin molecules together with another human protein or part thereof. In many cases, the Fe part in a fusion protein is beneficial in therapy and diagnosis, and thus can result in, for example, improved pharmacokinetic properties (EP-A 0232 262). Alternatively, deleting the Fe part after the fusion protein has been expressed, detected, and purified, would be desired. For example, the Fe portion may hinder therapy and diagnosis if the fusion protein is used as an antigen for immunizations. In drug discovery, for example, human proteins, such as hIL-5, have been fused with Fe portions for the purpose of high-throughput screening assays to identify antagonists of hIL-5. See, D. Bennett et al., J. Molecular Recognition 8:52-58 (1995); K. Johanson et al., J. Biol. Chem. 270:9459-9471 (1995).

[0163] Moreover, the polypeptides of the present invention can be fused to marker sequences, such as a polypeptide, which facilitates purification of the fused polypeptide. In preferred embodiments, the marker amino acid sequence is a hexa-histidine peptide, such as the tag provided in a pQE vector (QIAGEN, Inc., 9259 Eton Avenue, Chatsworth, Calif., 91311), among others, many of which are commercially available. As described in Gentz et al., Proc. Natl. Acad. Sci. USA 86:821-824 (1989), for instance, hexa-histidine provides for convenient purification of the fusion protein. Another peptide tag useful for purification, the “HA” tag, corresponds to an epitope derived from the influenza hemagglutinin protein (Wilson et al., Cell 37:767 (1984).)

[0164] Additional fusion proteins of the invention may be generated through the techniques of gene-shuffling, motif-shuffling, exon-shuffling, and/or codon-shuffling (collectively referred to as “DNA shuffling”), briefly described below, and further described herein. DNA shuffling may be employed to modulate the activities of polypeptides of the invention, such methods can be used to generate polypeptides with altered activity, as well as agonists and antagonists of the polypeptides. See, generally, U.S. Pat. Nos. 5,605,793; 5,811,238; 5,830,721; 5,834,252; and 5,837,458, and Patten et al., Curr. Opinion Biotechnol. 8:724-33 (1997); Harayama, Trends Biotechnol. 16(2):76-82 (1998); Hansson et al., J. Mol. Biol. 287:265-76 (1999); and Lorenzo and Blasco, Biotechniques 24(2):308-13 (1998); each of these patents and publications are hereby incorporated by reference in its entirety). In a preferred embodiment, one or more components, motifs, sections, parts, domains, fragments, etc., of a polynucleotide encoding a polypeptide of the invention may be recombined with one or more components, motifs, sections, parts, domains, fragments, etc., of one or more heterologous molecules encoding a heterologous polypeptide.

[0165] Thus, any of these above fusions can be engineered using the polynucleotides or the polypeptides of the present invention.

### Recombinant and Synthetic Production of Polypeptides of the Invention

[0166] The present invention also relates to vectors containing the polynucleotide of the present invention, host cells, and the production of polypeptides by synthetic and recombinant techniques. The vector may be, for example, a phage, plasmid, viral, or retroviral vector. Retroviral vectors may be replication competent or replication defective. In the latter case, viral propagation generally will occur only in complementing host cells.

[0167] The polynucleotides of the invention may be joined to a vector containing a selectable marker for propagation in a host. Generally, a plasmid vector is introduced in a precipitate, such as a calcium phosphate precipitate, or in a complex with a charged lipid. If the vector is a virus, it may be packaged in vitro using an appropriate packaging cell line and then transduced into host cells.

[0168] The polynucleotide insert should be operatively linked to an appropriate promoter, such as the phage lambda PL promoter, the E. coli lac, trp, phoA and tac promoters, the SV40 early and late promoters and promoters of retroviral LTRs, to name a few. Other suitable promoters will be known to the skilled artisan. The expression constructs will further contain sites for transcription initiation, termination, and, in the transcribed region, a ribosome binding site for translation. The coding portion of the transcripts expressed by the constructs will preferably include a translation initiating codon at the beginning and a termination codon (UAA, UGA or UAG) appropriately positioned at the end of the polypeptide to be translated.

[0169] As indicated, the expression vectors will preferably include at least one selectable marker. Such markers include dihydrofolate reductase, G418 or neomycin resistance, glutamine synthase, for eukaryotic cell culture and tetracycline, kanamycin or ampicillin resistance genes for culturing in E. coli and other bacteria. Representative examples of appropriate hosts include, but are not limited to, bacterial cells, such as E. coli, Streptomyces and Salmonella typhimurium cells; fungal cells, such as yeast cells (e.g., Saccharomyces cerevisiae or Pichia pastoris (ATCC Accession No. 201178)); insect cells such as Drosophila S2 and Spodoptera Sf9 cells; animal cells such as CHO, COS, 293, NSO and Bowes melanoma cells; and plant cells. Appropriate culture mediums and conditions for the above-described host cells are known in the art.

[0170] Among vectors preferred for use in bacteria include pQE70, pQE60 and pQE-9, available from QIAGEN, Inc.; pBluescript vectors, Phagescript vectors, pNH8A, pNH16a, pNH18A, pNH46A, available from Stratagene Cloning Systems, Inc.; and ptrc99a, pKK223-3, pKK233-3, pDR540, pRIT5 available from Pharmacia Biotech, Inc. Among preferred eukaryotic vectors are pWLNEO, pSV2CAT, pOG44, pXT1 and pSG available from Stratagene; and pSVK3, pBPV, pMSG and pSVL available from Pharmacia. Preferred expression vectors for use in yeast systems include, but are not limited to pYES2, pYD1, pTEF1/Zeo, pYES2/GS, pPICZ, pGAPZ, pGAPZalph, pPIC9, pPIC3.5, pHIL-D2, pHIL-S1, pPIC3.5K, pPIC9K, and PAO815 (all available from Invitrogen, Carlsbad, Calif.). Other suitable vectors will be readily apparent to the skilled artisan.

[0171] Vectors which use glutamine synthase (GS) or DHFR as the selectable markers can be amplified in the presence of the drugs methionine sulphoximine or methotrexate, respectively. An advantage of glutamine synthase based vectors is the availabilty of cell lines (e.g., the murine myeloma cell line, NSO) which are glutamine synthase negative. Glutamine synthase expression systems can also function in glutamine synthase expressing cells (e.g., Chinese Hamster Ovary (CHO) cells) by providing additional inhibitor to prevent the functioning of the endogenous gene. A glutamine synthase expression system and components thereof are detailed in PCT publications: WO87/04462; WO86/05807; WO89/01036; WO89/10404; and WO91/06657 which are hereby incorporated in their entireties by reference herein. Additionally, glutamine synthase expression vectors can be obtained from Lonza Biologics, Inc. (Portsmouth, N.H.). Expression and production of monoclonal antibodies using a GS expression system in murine myeloma cells is described in Bebbington et al., Bio/technology 10:169(1992) and in Biblia and Robinson Biotechnol. Prog. 11:1 (1995) which are herein incorporated by reference.

[0172] The present invention also relates to host cells containing the above-described vector constructs described herein, and additionally encompasses host cells containing nucleotide sequences of the invention that are operably associated with one or more heterologous control regions (e.g., promoter and/or enhancer) using techniques known of in the art. The host cell can be a higher eukaryotic cell, such as a mammalian cell (e.g., a human derived cell), or a lower eukaryotic cell, such as a yeast cell, or the host cell can be a prokaryotic cell, such as a bacterial cell. A host strain may be chosen, which modulates the expression of the inserted gene sequences, or modifies and processes the gene product in the specific fashion desired. Expression from certain promoters can be elevated in the presence of certain inducers; thus expression of the genetically engineered polypeptide may be controlled. Furthermore, different host cells have characteristics and specific mechanisms for the translational and post-translational processing and modification (e.g., phosphorylation, cleavage) of proteins. Appropriate cell lines can be chosen to ensure the desired modifications and processing of the foreign protein expressed.

[0173] Introduction of the nucleic acids and nucleic acid constructs of the invention into the host cell can be effected by calcium phosphate transfection, DEAE-dextran mediated transfection, cationic lipid-mediated transfection, electroporation, transduction, infection, or other methods. Such methods are described in many standard laboratory manuals, such as Davis et al., Basic Methods In Molecular Biology (1986). It is specifically contemplated that the polypeptides of the present invention may in fact be expressed by a host cell lacking a recombinant vector.

[0174] In addition to encompassing host cells containing the vector constructs discussed herein, the invention also encompasses primary, secondary, and immortalized host cells of vertebrate origin, particularly mammalian origin, that have been engineered to delete or replace endogenous genetic material (e.g., liver antigen coding sequence), and/or to include genetic material (e.g., heterologous polynucleotide sequences) that is operably associated with liver associated polynucleotides of the invention, and which activates, alters, and/or amplifies endogenous liver associated polynucleotides. For example, techniques known in the art may be used to operably associate heterologous control regions (e.g., promoter and/or enhancer) and endogenous liver associated polynucleotide sequences via homologous recombination (see, e.g., U.S. Pat. No. 5,641,670, issued Jun. 24, 1997; International Publication Number WO 96/29411; International Publication Number WO 94/12650; Koller et al., Proc. Natl. Acad. Sci. USA 86:8932-8935 (1989); and Zijlstra et al., Nature 342:435-438 (1989), the disclosures of each of which are incorporated by reference in their entireties).

[0175] Polypeptides of the present invention can also be recovered from: products purified from natural sources, including bodily fluids, tissues and cells, whether directly isolated or cultured; products of chemical synthetic procedures; and products produced by recombinant techniques from a prokaryotic or eukaryotic host, including, for example, bacterial, yeast, higher plant, insect, and mammalian cells. Depending upon the host employed in a recombinant production procedure, the polypeptides of the present invention may be glycosylated or may be non-glycosylated. In addition, polypeptides of the invention may also include an initial modified methionine residue, in some cases as a result of host-mediated processes. Thus, it is well known in the art that the N-terminal methionine encoded by the translation initiation codon generally is removed with high efficiency from any protein after translation in all eukaryotic cells. While the N-terminal methionine on most proteins also is efficiently removed in most prokaryotes, for some proteins, this prokaryotic removal process is inefficient, depending on the nature of the amino acid to which the N-terminal methionine is covalently linked.

[0176] In one embodiment, the yeast Pichia pastoris is used to express polypeptides of the invention in a eukaryotic system. Pichia pastoris is a methylotrophic yeast which can metabolize methanol as its sole carbon source. A main step in the methanol metabolization pathway is the oxidation of methanol to formaldehyde using O₂. This reaction is catalyzed by the enzyme alcohol oxidase. In order to metabolize methanol as its sole carbon source, Pichia pastoris must generate high levels of alcohol oxidase due, in part, to the relatively low affinity of alcohol oxidase for O₂. Consequently, in a growth medium depending on methanol as a main carbon source, the promoter region of one of the two alcohol oxidase genes (AOX1) is highly active. In the presence of methanol, alcohol oxidase produced from the AOX1 gene comprises up to approximately 30% of the total soluble protein in Pichia pastoris. See, Ellis, S. B., et al., Mol. Cell. Biol. 5:1111-21 (1985); Koutz, P. J, et al., Yeast 5:167-77 (1989); Tschopp, J. F., et al., Nucl. Acids Res. 15:3859-76 (1987). Thus, a heterologous coding sequence, such as, for example, a polynucleotide of the present invention, under the transcriptional regulation of all or part of the AOX1 regulatory sequence is expressed at exceptionally high levels in Pichia yeast grown in the presence of methanol.

[0177] In one example, the plasmid vector pPIC9K is used to express DNA encoding a polypeptide of the invention, as set forth herein, in a Pichea yeast system essentially as described in “Pichia Protocols: Methods in Molecular Biology,” D. R. Higgins and J. Cregg, eds. The Humana Press, Totowa, N.J., 1998. This expression vector allows expression and secretion of a polypeptide of the invention by virtue of the strong AOX1 promoter linked to the Pichia pastoris alkaline phosphatase (PHO) secretory signal peptide (i.e., leader) located upstream of a multiple cloning site.

[0178] Many other yeast vectors could be used in place of pPIC9K, such as, pYES2, pYD1, pTEF1/Zeo, pYES2/GS, pPICZ, pGAPZ, pGAPZalpha, pPIC9, pPIC3.5, pHIL-D2, pHIL-S1, pPIC3.5K, and PAO815, as one skilled in the art would readily appreciate, as long as the proposed expression construct provides appropriately located signals for transcription, translation, secretion (if desired), and the like, including an in-frame AUG as required.

[0179] In another embodiment, high-level expression of a heterologous coding sequence, such as, for example, a polynucleotide of the present invention, may be achieved by cloning the heterologous polynucleotide of the invention into an expression vector such as, for example, pGAPZ or pGAPZalpha, and growing the yeast culture in the absence of methanol.

[0180] In addition to encompassing host cells containing the vector constructs discussed herein, the invention also encompasses primary, secondary, and immortalized host cells of vertebrate origin, particularly mammalian origin, that have been engineered to delete or replace endogenous genetic material (e.g., coding sequence), and/or to include genetic material (e.g., heterologous polynucleotide sequences) that is operably associated with polynucleotides of the invention, and which activates, alters, and/or amplifies endogenous polynucleotides. For example, techniques known in the art may be used to operably associate heterologous control regions (e.g., promoter and/or enhancer) and endogenous polynucleotide sequences via homologous recombination (see, e.g., U.S. Pat. No. 5,641,670, issued Jun. 24, 1997; International Publication No. WO 96/29411, published Sep. 26, 1996; International Publication No. WO 94/12650, published Aug. 4, 1994; Koller et al., Proc. Natl. Acad. Sci. USA 86:8932-8935 (1989); and Zijlstra et al., Nature 342:435-438 (1989), the disclosures of each of which are incorporated by reference in their entireties).

[0181] In addition, polypeptides of the invention can be chemically synthesized using techniques known in the art (e.g., see Creighton, 1983, Proteins: Structures and Molecular Principles, W. H. Freeman & Co., N.Y., and Hunkapiller et al., Nature, 310:105-111 (1984)). For example, a polypeptide corresponding to a fragment of a polypeptide can be synthesized by use of a peptide synthesizer. Furthermore, if desired, nonclassical amino acids or chemical amino acid analogs can be introduced as a substitution or addition into the polypeptide sequence. Non-classical amino acids include, but are not limited to, to the D-isomers of the common amino acids, 2,4-diaminobutyric acid, a-amino isobutyric acid, 4-aminobutyric acid, Abu, 2-amino butyric acid, g-Abu, e-Ahx, 6-amino hexanoic acid, Aib, 2-amino isobutyric acid, 3-amino propionic acid, ornithine, norleucine, norvaline, hydroxyproline, sarcosine, citrulline, homocitrulline, cysteic acid, t-butylglycine, t-butylalanine, phenylglycine, cyclohexylalanine, b-alanine, fluoro-amino acids, designer amino acids such as b-methyl amino acids, Ca-methyl amino acids, Na-methyl amino acids, and amino acid analogs in general. Furthermore, the amino acid can be D (dextrorotary) or L (levorotary).

[0182] The invention encompasses polypeptides of the present invention which are differentially modified during or after translation, e.g., by glycosylation, acetylation, phosphorylation, amidation, derivatization by known protecting/blocking groups, proteolytic cleavage, linkage to an antibody molecule or other cellular ligand, etc. Any of numerous chemical modifications may be carried out by known techniques, including but not limited, to specific chemical cleavage by cyanogen bromide, trypsin, chymotrypsin, papain, V8 protease, NaBH₄; acetylation, formylation, oxidation, reduction; metabolic synthesis in the presence of tunicamycin; etc.

[0183] Additional post-translational modifications encompassed by the invention include, for example, e.g., N-linked or O-linked carbohydrate chains, processing of N-terminal or C-terminal ends), attachment of chemical moieties to the amino acid backbone, chemical modifications of N-linked or O-linked carbohydrate chains, and addition or deletion of an N-terminal methionine residue as a result of procaryotic host cell expression. The polypeptides may also be modified with a detectable label, such as an enzymatic, fluorescent, isotopic or affinity label to allow for detection and isolation of the protein.

[0184] Examples of suitable enzymes include horseradish peroxidase, alkaline phosphatase, beta-galactosidase, or acetylcholinesterase; examples of suitable prosthetic group complexes include streptavidin/biotin and avidin/biotin; examples of suitable fluorescent materials include umbelliferone, fluorescein, fluorescein isothiocyanate, rhodamine, dichlorotriazinylamine fluorescein, dansyl chloride or phycoerythrin; an example of a luminescent material includes luminol; examples of bioluminescent materials include luciferase, luciferin, and aequorin; and examples of suitable radioactive material include iodine (¹²¹I, ¹²³I, ¹²⁵I, ¹³¹I), carbon (¹⁴C), sulfur (³⁵S), tritium (³H), indium (¹¹¹In, ¹¹²In, ^{113m}In, ^{115m}In), technetium (⁹⁹Tc, ^{99m}Tc), thallium (²⁰¹Ti), gallium (⁶⁸Ga, ⁶⁷Ga), palladium (¹⁰³Pd), molybdenum (⁹⁹Mo), xenon (¹³³Xe), fluorine (¹⁸F), ¹⁵³Sm, ¹⁷⁷Lu, ¹⁵⁹Gd, ¹⁴⁹Pm, ¹⁴⁰La, ¹⁷⁵Yb, ¹⁶⁶Ho, ⁹⁰Y, ⁴⁷Sc, ¹⁸⁶Re, ¹⁸⁸Re, ¹⁴²Pr, ¹⁰⁵Rh, and ⁹⁷Ru.

[0185] In specific embodiments, a polypeptide of the present invention or fragment or variant thereof is attached to macrocyclic chelators that associate with radiometal ions, including but not limited to, ¹⁷⁷Lu, ⁹⁰y, ¹⁶⁶Ho, and ¹⁵³Sm, to polypeptides. In a preferred embodiment, the radiometal ion associated with the macrocyclic chelators is ¹¹¹In. In another preferred embodiment, the radiometal ion associated with the macrocyclic chelator is ⁹⁰Y. In specific embodiments, the macrocyclic chelator is 1,4,7,10-tetraazacyclododecane-N,N′,N″,N′″-tetraacetic acid (DOTA). In other specific embodiments, DOTA is attached to an antibody of the invention or fragment thereof via a linker molecule. Examples of linker molecules useful for conjugating DOTA to a polypeptide are commonly known in the art—see, for example, DeNardo et al., Clin Cancer Res. 4(10):2483-90 (1998); Peterson et al., Bioconjug. Chem. 10(4):553-7 (1999); and Zimmerman et al, Nucl. Med. Biol. 26(8):943-50 (1999); which are hereby incorporated by reference in their entirety.

[0186] As mentioned, the liver associated proteins of the invention may be modified by either natural processes, such as posttranslational processing, or by chemical modification techniques which are well known in the art. It will be appreciated that the same type of modification may be present in the same or varying degrees at several sites in a given liver associated polypeptide. liver associated polypeptides may be branched, for example, as a result of ubiquitination, and they may be cyclic, with or without branching. Cyclic, branched, and branched cyclic liver associated polypeptides may result from posttranslation natural processes or may be made by synthetic methods. Modifications include acetylation, acylation, ADP-ribosylation, amidation, covalent attachment of flavin, covalent attachment of a heme moiety, covalent attachment of a nucleotide or nucleotide derivative, covalent attachment of a lipid or lipid derivative, covalent attachment of phosphotidylinositol, cross-linking, cyclization, disulfide bond formation, demethylation, formation of covalent cross-links, formation of cysteine, formation of pyroglutamate, formylation, gamma-carboxylation, glycosylation, GPI anchor formation, hydroxylation, iodination, methylation, myristoylation, oxidation, pegylation, proteolytic processing, phosphorylation, prenylation, racemization, selenoylation, sulfation, transfer-RNA mediated addition of amino acids to proteins such as arginylation, and ubiquitination. (See, for instance, PROTEINS—STRUCTURE AND MOLECULAR PROPERTIES, 2nd Ed., T. E. Creighton, W. H. Freeman and Company, New York (1993); POSTTRANSLATIONAL COVALENT MODIFICATION OF PROTEINS, B. C. Johnson, Ed., Academic Press, New York, pgs. 1-12 (1983); Seifter et al., Meth. Enzymol. 182:626-646 (1990); Rattan et al., Ann. N.Y. Acad. Sci. 663:48-62 (1992)).

[0187] Also provided by the invention are chemically modified derivatives of the polypeptides of the invention which may provide additional advantages such as increased solubility, stability and circulating time of the polypeptide, or decreased immunogenicity (see U.S. Pat. No. 4,179,337). The chemical moieties for derivitization may be selected from water soluble polymers such as polyethylene glycol, ethylene glycol/propylene glycol copolymers, carboxymethylcellulose, dextran, polyvinyl alcohol and the like. The polypeptides may be modified at random positions within the molecule, or at predetermined positions within the molecule and may include one, two, three or more attached chemical moieties.

[0188] The polymer may be of any molecular weight, and may be branched or unbranched. For polyethylene glycol, the preferred molecular weight is between about 1 kDa and about 100 kDa (the term “about” indicating that in preparations of polyethylene glycol, some molecules will weigh more, some less, than the stated molecular weight) for ease in handling and manufacturing. Other sizes may be used, depending on the desired therapeutic profile (e.g., the duration of sustained release desired, the effects, if any on biological activity, the ease in handling, the degree or lack of antigenicity and other known effects of the polyethylene glycol to a therapeutic protein or analog). For example, the polyethylene glycol may have an average molecular weight of about 200, 500, 1000, 1500, 2000, 2500, 3000, 3500, 4000, 4500, 5000, 5500, 6000, 6500, 7000, 7500, 8000, 8500, 9000, 9500, 10,000, 10,500, 11,000, 11,500, 12,000, 12,500, 13,000, 13,500, 14,000, 14,500, 15,000, 15,500, 16,000, 16,500, 17,000, 17,500, 18,000, 18,500, 19,000, 19,500, 20,000, 25,000, 30,000, 35,000, 40,000, 50,000, 55,000, 60,000, 65,000, 70,000, 75,000, 80,000, 85,000, 90,000, 95,000, or 100,000 kDa.

[0189] As noted above, the polyethylene glycol may have a branched structure. Branched polyethylene glycols are described, for example, in U.S. Pat. No. 5,643,575; Morpurgo et al., Appl. Biochem. Biotechnol. 56:59-72 (1996); Vorobjev et al., Nucleosides Nucleotides 18:2745-2750 (1999); and Caliceti et al., Bioconjug. Chem. 10:638-646 (1999), the disclosures of each of which are incorporated herein by reference.

[0190] The polyethylene glycol molecules (or other chemical moieties) should be attached to the protein with consideration of effects on functional or antigenic domains of the protein. There are a number of attachment methods available to those skilled in the art, such as, for example, the method disclosed in EP 0 401 384 (coupling PEG to G-CSF), herein incorporated by reference; see also Malik et al., Exp. Hematol. 20:1028-1035 (1992), reporting pegylation of GM-CSF using tresyl chloride. For example, polyethylene glycol may be covalently bound through amino acid residues via a reactive group, such as a free amino or carboxyl group. Reactive groups are those to which an activated polyethylene glycol molecule may be bound. The amino acid residues having a free amino group may include lysine residues and the N-terminal amino acid residues; those having a free carboxyl group may include aspartic acid residues glutamic acid residues and the C-terminal amino acid residue. Sulfhydryl groups may also be used as a reactive group for attaching the polyethylene glycol molecules. Preferred for therapeutic purposes is attachment at an amino group, such as attachment at the N-terminus or lysine group.

[0191] As suggested above, polyethylene glycol may be attached to proteins via linkage to any of a number of amino acid residues. For example, polyethylene glycol can be linked to proteins via covalent bonds to lysine, histidine, aspartic acid, glutamic acid, or cysteine residues. One or more reaction chemistries may be employed to attach polyethylene glycol to specific amino acid residues (e.g., lysine, histidine, aspartic acid, glutamic acid, or cysteine) of the protein or to more than one type of amino acid residue (e.g., lysine, histidine, aspartic acid, glutamic acid, cysteine and combinations thereof) of the protein.

[0192] One may specifically desire proteins chemically modified at the N-terminus. Using polyethylene glycol as an illustration of the present composition, one may select from a variety of polyethylene glycol molecules (by molecular weight, branching, etc.), the proportion of polyethylene glycol molecules to protein (polypeptide) molecules in the reaction mix, the type of pegylation reaction to be performed, and the method of obtaining the selected N-terminally pegylated protein. The method of obtaining the N-terminally pegylated preparation (i.e., separating this moiety from other monopegylated moieties if necessary) may be by purification of the N-terminally pegylated material from a population of pegylated protein molecules. Selective proteins chemically modified at the N-terminus modification may be accomplished by reductive alkylation which exploits differential reactivity of different types of primary amino groups (lysine versus the N-terminal) available for derivatization in a particular protein. Under the appropriate reaction conditions, substantially selective derivatization of the protein at the N-terminus with a carbonyl group containing polymer is achieved.

[0193] As indicated above, pegylation of the proteins of the invention may be accomplished by any number of means. For example, polyethylene glycol may be attached to the protein either directly or by an intervening linker. Linkerless systems for attaching polyethylene glycol to proteins are described in Delgado et al., Crit. Rev. Thera. Drug Carrier Sys. 9:249-304 (1992); Francis et al., Intern. J. of Hematol. 68:1-18 (1998); U.S. Pat. No. 4,002,531; U.S. Pat. No. 5,349,052; WO 95/06058; and WO 98/32466, the disclosures of each of which are incorporated herein by reference.

[0194] One system for attaching polyethylene glycol directly to amino acid residues of proteins without an intervening linker employs tresylated MPEG, which is produced by the modification of monmethoxy polyethylene glycol (MPEG) using tresylchloride (CISO₂CH₂CF₃). Upon reaction of protein with tresylated MPEG, polyethylene glycol is directly attached to amine groups of the protein. Thus, the invention includes protein-polyethylene glycol conjugates produced by reacting proteins of the invention with a polyethylene glycol molecule having a 2,2,2-trifluoreothane sulphonyl group.

[0195] Polyethylene glycol can also be attached to proteins using a number of different intervening linkers. For example, U.S. Pat. No. 5,612,460, the entire disclosure of which is incorporated herein by reference, discloses urethane linkers for connecting polyethylene glycol to proteins. Protein-polyethylene glycol conjugates wherein the polyethylene glycol is attached to the protein by a linker can also be produced by reaction of proteins with compounds such as MPEG-succinimidylsuccinate, MPEG activated with 1,1′-carbonyldiimidazole, MPEG-2,4,5-trichloropenylcarbonate, MPEG-p-nitrophenolcarbonate, and various MPEG-succinate derivatives. A number of additional polyethylene glycol derivatives and reaction chemistries for attaching polyethylene glycol to proteins are described in International Publication No. WO 98/32466, the entire disclosure of which is incorporated herein by reference. Pegylated protein products produced using the reaction chemistries set out herein are included within the scope of the invention.

[0196] The number of polyethylene glycol moieties attached to each protein of the invention (i.e., the degree of substitution) may also vary. For example, the pegylated proteins of the invention may be linked, on average, to 1, 2, 3, 4, 5, 6, 7, 8, 9, 10, 12, 15, 17, 20, or more polyethylene glycol molecules. Similarly, the average degree of substitution within ranges such as 1-3, 2-4, 3-5, 4-6, 5-7, 6-8, 7-9, 8-10, 9-11, 10-12, 11-13, 12-14, 13-15, 14-16, 15-17, 16-18, 17-19, or 18-20 polyethylene glycol moieties per protein molecule. Methods for determining the degree of substitution are discussed, for example, in Delgado et al., Crit. Rev. Thera. Drug Carrier Sys. 9:249-304 (1992).

[0197] The liver associated polypeptides of the invention can be recovered and purified from chemical synthesis and recombinant cell cultures by standard methods which include, but are not limited to, ammonium sulfate or ethanol precipitation, acid extraction, anion or cation exchange chromatography, phosphocellulose chromatography, hydrophobic interaction chromatography, affinity chromatography, hydroxylapatite chromatography and lectin chromatography. Most preferably, high performance liquid chromatography (“HPLC”)is employed for purification. Well known techniques for refolding protein may be employed to regenerate active conformation when the polypeptide is denatured during isolation and/or purification.

[0198] Liver associated polynucleotides and polypeptides may be used in accordance with the present invention for a variety of applications, particularly those that make use of the chemical and biological properties of liver associated antigens. Among these are applications in the detection, prevention, diagnosis and/or treatment of diseases associated with the liver, such as e.g., liver cancer, tumors, infections (e.g., infections due to viruses, such as, cytomegalovirus, Epstein-Barr, hepatitis A virus, hepatitis B virus, hepatitis non-A, non-B; infections due to fungi; infections due to bacteria; infections due to parasites, such as, Clonorchis sinensis, Echinococcus granulosus, Entamoeba histolytica), inflammations (e.g., cirrhosis, acute hepatitis, granulomatous hepatitis), disorders due to toxin damage (such as, exposure to poisons, drugs (such as, acetaminophen, chlorpromazine), environmental poisons (such as, carbon tetrachloride or vinyl chloride)) (e.g., acute canalicular hepatitis), autoimmune diseases (e.g., Wilson's disease, primary biliary cirrhosis), neoplastic disorders (e.g., adenomas, hemangiomas, hepatocellular carcinoma), and/or as described under “Gastrointestinal Disorders” below. Additional applications relate to diagnosis and to treatment of disorders of cells, tissues and organisms. These aspects of the invention are discussed further below.

[0199] In a preferred embodiment, polynucleotides expressed in a particular tissue type are used to detect, diagnose, treat, prevent and/or prognose disorders associated with the tissue type.

[0200] The polypeptides of the invention may be in monomers or multimers (i.e., dimers, trimers, tetramers and higher multimers). Accordingly, the present invention relates to monomers and multimers of the polypeptides of the invention, their preparation, and compositions (preferably, Therapeutics) containing them. In specific embodiments, the polypeptides of the invention are monomers, dimers, trimers or tetramers. In additional embodiments, the multimers of the invention are at least dimers, at least trimers, or at least tetramers.

[0201] Multimers encompassed by the invention may be homomers or heteromers. As used herein, the term homomer refers to a multimer containing only polypeptides corresponding to a protein of the invention (e.g., the amino acid sequence of SEQ ID NO:Y, an amino acid sequence encoded by SEQ ID NO:X or the complement of SEQ ID NO:X, the amino acid sequence encoded by the portion of SEQ ID NO:X as defined in columns 8 and 9 of Table 2, and/or an amino acid sequence encoded by cDNA contained in Clone ID NO:Z (including fragments, variants, splice variants, and fusion proteins, corresponding to these as described herein)). These homomers may contain polypeptides having identical or different amino acid sequences. In a specific embodiment, a homomer of the invention is a multimer containing only polypeptides having an identical amino acid sequence. In another specific embodiment, a homomer of the invention is a multimer containing polypeptides having different amino acid sequences. In specific embodiments, the multimer of the invention is a homodimer (e.g., containing two polypeptides having identical or different amino acid sequences) or a homotrimer (e.g., containing three polypeptides having identical and/or different amino acid sequences). In additional embodiments, the homomeric multimer of the invention is at least a homodimer, at least a homotrimer, or at least a homotetramer.

[0202] As used herein, the term heteromer refers to a multimer containing two or more heterologous polypeptides (i.e., polypeptides of different proteins) in addition to the polypeptides of the invention. In a specific embodiment, the multimer of the invention is a heterodimer, a heterotrimer, or a heterotetramer. In additional embodiments, the heteromeric multimer of the invention is at least a heterodimer, at least a heterotrimer, or at least a heterotetramer.

[0203] Multimers of the invention may be the result of hydrophobic, hydrophilic, ionic and/or covalent associations and/or may be indirectly linked by, for example, liposome formation. Thus, in one embodiment, multimers of the invention, such as, for example, homodimers or homotrimers, are formed when polypeptides of the invention contact one another in solution. In another embodiment, heteromultimers of the invention, such as, for example, heterotrimers or heterotetramers, are formed when polypeptides of the invention contact antibodies to the polypeptides of the invention (including antibodies to the heterologous polypeptide sequence in a fusion protein of the invention) in solution. In other embodiments, multimers of the invention are formed by covalent associations with and/or between the polypeptides of the invention. Such covalent associations may involve one or more amino acid residues contained in the polypeptide sequence (e.g., that recited in SEQ ID NO:Y, encoded by the portion of SEQ ID NO:X as defined in columns 8 and 9 of Table 2, and/or encoded by the cDNA contained in Clone ID NO:Z). In one instance, the covalent associations are cross-linking between cysteine residues located within the polypeptide sequences which interact in the native (i.e., naturally occurring) polypeptide. In another instance, the covalent associations are the consequence of chemical or recombinant manipulation. Alternatively, such covalent associations may involve one or more amino acid residues contained in the heterologous polypeptide sequence in a fusion protein. In one example, covalent associations are between the heterologous sequence contained in a fusion protein of the invention (see, e.g., U.S. Pat. Number 5,478,925). In a specific example, the covalent associations are between the heterologous sequence contained in a Fc fusion protein of the invention (as described herein). In another specific example, covalent associations of fusion proteins of the invention are between heterologous polypeptide sequence from another protein that is capable of forming covalently associated multimers, such as for example, osteoprotegerin (see, e.g., International Publication NO: WO 98/49305, the contents of which are herein incorporated by reference in its entirety). In another embodiment, two or more polypeptides of the invention are joined through peptide linkers. Examples include those peptide linkers described in U.S. Pat. No. 5,073,627 (hereby incorporated by reference). Proteins comprising multiple polypeptides of the invention separated by peptide linkers may be produced using conventional recombinant DNA technology.

[0204] Another method for preparing multimer polypeptides of the invention involves use of polypeptides of the invention fused to a leucine zipper or isoleucine zipper polypeptide sequence. Leucine zipper and isoleucine zipper domains are polypeptides that promote multimerization of the proteins in which they are found. Leucine zippers were originally identified in several DNA-binding proteins (Landschulz et al., Science 240:1759, (1988)), and have since been found in a variety of different proteins. Among the known leucine zippers are naturally occurring peptides and derivatives thereof that dimerize or trimerize. Examples of leucine zipper domains suitable for producing soluble multimeric proteins of the invention are those described in PCT application WO 94/10308, hereby incorporated by reference. Recombinant fusion proteins comprising a polypeptide of the invention fused to a polypeptide sequence that dimerizes or trimerizes in solution are expressed in suitable host cells, and the resulting soluble multimeric fusion protein is recovered from the culture supernatant using techniques known in the art.

[0205] Trimeric polypeptides of the invention may offer the advantage of enhanced biological activity. Preferred leucine zipper moieties and isoleucine moieties are those that preferentially form trimers. One example is a leucine zipper derived from lung surfactant protein D (SPD), as described in Hoppe et al. (FEBS Letters 344:191, (1994)) and in U.S. patent application Ser. No. 08/446,922, hereby incorporated by reference. Other peptides derived from naturally occurring trimeric proteins may be employed in preparing trimeric polypeptides of the invention.

[0206] In another example, proteins of the invention are associated by interactions between Flag® polypeptide sequence contained in fusion proteins of the invention containing Flag® polypeptide sequence. In a further embodiment, proteins of the invention are associated by interactions between heterologous polypeptide sequence contained in Flag® fusion proteins of the invention and anti-Flag® antibody.

[0207] The multimers of the invention may be generated using chemical techniques known in the art. For example, polypeptides desired to be contained in the multimers of the invention may be chemically cross-linked using linker molecules and linker molecule length optimization techniques known in the art (see, e.g., U.S. Pat. No. 5,478,925, which is herein incorporated by reference in its entirety). Additionally, multimers of the invention may be generated using techniques known in the art to form one or more inter-molecule cross-links between the cysteine residues located within the sequence of the polypeptides desired to be contained in the multimer (see, e.g., U.S. Pat. No. 5,478,925, which is herein incorporated by reference in its entirety). Further, polypeptides of the invention may be routinely modified by the addition of cysteine or biotin to the C-terminus or N-terminus of the polypeptide and techniques known in the art may be applied to generate multimers containing one or more of these modified polypeptides (see, e.g., U.S. Pat. No. 5,478,925, which is herein incorporated by reference in its entirety). Additionally, techniques known in the art may be applied to generate liposomes containing the polypeptide components desired to be contained in the multimer of the invention (see, e.g., U.S. Pat. No. 5,478,925, which is herein incorporated by reference in its entirety).

[0208] Alternatively, multimers of the invention may be generated using genetic engineering techniques known in the art. In one embodiment, polypeptides contained in multimers of the invention are produced recombinantly using fusion protein technology described herein or otherwise known in the art (see, e.g., U.S. Pat. No. 5,478,925, which is herein incorporated by reference in its entirety). In a specific embodiment, polynucleotides coding for a homodimer of the invention are generated by ligating a polynucleotide sequence encoding a polypeptide of the invention to a sequence encoding a linker polypeptide and then further to a synthetic polynucleotide encoding the translated product of the polypeptide in the reverse orientation from the original C-terminus to the N-terminus (lacking the leader sequence) (see, e.g., U.S. Pat. No. 5,478,925, which is herein incorporated by reference in its entirety). In another embodiment, recombinant techniques described herein or otherwise known in the art are applied to generate recombinant polypeptides of the invention which contain a transmembrane domain (or hydrophobic or signal peptide) and which can be incorporated by membrane reconstitution techniques into liposomes (see, e.g., U.S. Pat. No. 5,478,925, which is herein incorporated by reference in its entirety).

### Antibodies

[0209] Further polypeptides of the invention relate to antibodies and T-cell antigen receptors (TCR) which immunospecifically bind a polypeptide, polypeptide fragment, or variant of the invention (e.g., a polypeptide or fragment or variant of the amino acid sequence of SEQ ID NO:Y or a polypeptide encoded by the cDNA contained in Clone ID NO:Z, and/or an epitope, of the present invention) as determined by immunoassays well known in the art for assaying specific antibody-antigen binding. Antibodies of the invention include, but are not limited to, polyclonal, monoclonal, multispecific, human, humanized or chimeric antibodies, single chain antibodies, Fab fragments, F(ab′) fragments, fragments produced by a Fab expression library, anti-idiotypic (anti-Id) antibodies (including, e.g., anti-Id antibodies to antibodies of the invention), intracellularly-made antibodies (i.e., intrabodies), and epitope-binding fragments of any of the above. The term “antibody,” as used herein, refers to immunoglobulin molecules and immunologically active portions of immunoglobulin molecules, i.e., molecules that contain an antigen binding site that immunospecifically binds an antigen. The immunoglobulin molecules of the invention can be of any type (e.g., IgG, IgE, IgM, IgD, IgA and IgY), class (e.g., IgG1, IgG2, IgG3, IgG4, IgA1 and IgA2) or subclass of immunoglobulin molecule. In preferred embodiments, the immunoglobulin molecules of the invention are IgGI. In other preferred embodiments, the immunoglobulin molecules of the invention are IgG4.

[0210] Most preferably the antibodies are human antigen-binding antibody fragments of the present invention and include, but are not limited to, Fab, Fab′ and F(ab′)2, Fd, single-chain Fvs (scFv), single-chain antibodies, disulfide-linked Fvs (sdFv) and fragments comprising either a VL or VH domain. Antigen-binding antibody fragments, including single-chain antibodies, may comprise the variable region(s) alone or in combination with the entirety or a portion of the following: hinge region, CH1, CH2, and CH3 domains. Also included in the invention are antigen-binding fragments also comprising any combination of variable region(s) with a hinge region, CH1, CH2, and CH3 domains. The antibodies of the invention may be from any animal origin including birds and mammals. Preferably, the antibodies are human, murine (e.g., mouse and rat), donkey, ship rabbit, goat, guinea pig, camel, horse, or chicken. As used herein, “human” antibodies include antibodies having the amino acid sequence of a human immunoglobulin and include antibodies isolated from human immunoglobulin libraries or from animals transgenic for one or more human immunoglobulin and that do not express endogenous immunoglobulins, as described infra and, for example in, U.S. Pat. No. 5,939,598 by Kucherlapati et al.

[0211] The antibodies of the present invention may be monospecific, bispecific, trispecific or of greater multispecificity. Multispecific antibodies may be specific for different epitopes of a polypeptide of the present invention or may be specific for both a polypeptide of the present invention as well as for a heterologous epitope, such as a heterologous polypeptide or solid support material. See, e.g., PCT publications WO 93/17715; WO 92/08802; WO 91/00360; WO 92/05793; Tutt, et al., J. Immunol. 147:60-69 (1991); U.S. Pat. Nos. 4,474,893; 4,714,681; 4,925,648; 5,573,920; 5,601,819; Kostelny et al., J. Immunol. 148:1547-1553 (1992).

[0212] Antibodies of the present invention may be described or specified in terms of the epitope(s) or portion(s) of a polypeptide of the present invention which they recognize or specifically bind. The epitope(s) or polypeptide portion(s) may be specified as described herein, e.g., by N-terminal and C-terminal positions, or by size in contiguous amino acid residues, or listed in the Tables and Figures. Preferred epitopes of the invention include those shown in column 6 of Table 1A, as well as polynucleotides that encode these epitopes. Antibodies, which specifically bind any epitope or polypeptide of the present invention may also be excluded. Therefore, the present invention includes antibodies that specifically bind polypeptides of the present invention, and allows for the exclusion of the same.

[0213] Antibodies of the present invention may also be described or specified in terms of their cross-reactivity. Antibodies that do not bind any other analog, ortholog, or homolog of a polypeptide of the present invention are included. Antibodies that bind polypeptides with at least 95%, at least 90%, at least 85%, at least 80%, at least 75%, at least 70%, at least 65%, at least 60%, at least 55%, and at least 50% identity (as calculated using methods known in the art and described herein) to a polypeptide of the present invention are also included in the present invention. In specific embodiments, antibodies of the present invention cross-react with murine, rat and/or rabbit homologs of human proteins and the corresponding epitopes thereof. Antibodies that do not bind polypeptides with less than 95%, less than 90%, less than 85%, less than 80%, less than 75%, less than 70%, less than 65%, less than 60%, less than 55%, and less than 50% identity (as calculated using methods known in the art and described herein) to a polypeptide of the present invention are also included in the present invention. In a specific embodiment, the above-described cross-reactivity is with respect to any single specific antigenic or immunogenic polypeptide, or combination(s) of 2, 3, 4, 5, or more of the specific antigenic and/or immunogenic polypeptides disclosed herein. Further included in the present invention are antibodies which bind polypeptides encoded by polynucleotides which hybridize to a polynucleotide of the present invention under stringent hybridization conditions (as described herein). Antibodies of the present invention may also be described or specified in terms of their binding affinity to a polypeptide of the invention. Preferred binding affinities include those with a dissociation constant or Kd less than 5×10⁻² M, 10⁻² M, 5×10⁻³ M, 10⁻³ M, 5×10⁻⁴ M, 10⁻⁴ M, 5×10⁻⁵ M, 10⁻⁵ M, 5×10⁻⁶ M, 10^{-6 M,} 5×10⁻⁷ M, 10⁷ M, 5×10⁻⁸ M, 10⁻⁸ M, 5×10⁻⁹ M, 10⁻⁹ M, 5×10⁻¹⁰ M, 10⁻¹⁰ M, 5×1⁻¹¹ M, 10⁻¹¹ M, 5×10⁻¹² M, 10⁻¹² M, 5×10⁻¹³ M, 10⁻¹³ M, 5×10⁻¹⁴ M, 10⁻¹⁴ M, 5×10⁻¹⁵ M, or 10⁻¹⁵ M.

[0214] The invention also provides antibodies that competitively inhibit binding of an antibody to an epitope of the invention as determined by any method known in the art for determining competitive binding, for example, the immunoassays described herein. In preferred embodiments, the antibody competitively inhibits binding to the epitope by at least 95%, at least 90%, at least 85%, at least 80%, at least 75%, at least 70%, at least 60%, or at least 50%.

[0215] Antibodies of the present invention may act as agonists or antagonists of the polypeptides of the present invention. For example, the present invention includes antibodies which disrupt the receptor/ligand interactions with the polypeptides of the invention either partially or fully. Preferably, antibodies of the present invention bind an antigenic epitope disclosed herein, or a portion thereof. The invention features both receptor-specific antibodies and ligand-specific antibodies. The invention also features receptor-specific antibodies, which do not prevent ligand binding but prevent receptor activation. Receptor activation (i.e., signaling) may be determined by techniques described herein or otherwise known in the art. For example, receptor activation can be determined by detecting the phosphorylation (e.g., tyrosine or serine/threonine) of the receptor or its substrate by immunoprecipitation followed by western blot analysis (for example, as described supra). In specific embodiments, antibodies are provided that inhibit ligand activity or receptor activity by at least 95%, at least 90%, at least 85%, at least 80%, at least 75%, at least 70%, at least 60%, or at least 50% of the activity in absence of the antibody.

[0216] The invention also features receptor-specific antibodies which both prevent ligand binding and receptor activation as well as antibodies that recognize the receptor-ligand complex, and, preferably, do not specifically recognize the unbound receptor or the unbound ligand. Likewise, included in the invention are neutralizing antibodies which bind the ligand and prevent binding of the ligand to the receptor, as well as antibodies which bind the ligand, thereby preventing receptor activation, but do not prevent the ligand from binding the receptor. Further included in the invention are antibodies, which activate the receptor. These antibodies may act as receptor agonists, i.e., potentiate or activate either all or a subset of the biological activities of the ligand-mediated receptor activation, for example, by inducing dimerization of the receptor. The antibodies may be specified as agonists, antagonists or inverse agonists for biological activities comprising the specific biological activities of the peptides of the invention disclosed herein. The above antibody agonists can be made using methods known in the art. See, e.g., PCT publication WO 96/40281; U.S. Pat. No. 5,811,097; Deng et al., Blood 92(6):1981-1988 (1998); Chen et al., Cancer Res. 58(16):3668-3678 (1998); Harrop et al., J. Immunol. 161(4):1786-1794 (1998); Zhu et al., Cancer Res. 58(15):3209-3214 (1998); Yoon et al., J. Immunol. 160(7):3170-3179 (1998); Prat et al., J. Cell. Sci. 111(Pt2):237-247 (1998); Pitard et al., J. Immunol. Methods 205(2):177-190 (1997); Liautard et al., Cytokine 9(4):233-241 (1997); Carlson et al., J. Biol. Chem. 272(17):11295-11301 (1997); Taryman et al., Neuron 14(4):755-762 (1995); Muller et al., Structure 6(9):1153-1167 (1998); Bartunek et a Cytokine 8(1):14-20 (1996) (which are all incorporated by reference herein in their entireties).

[0217] Antibodies of the present invention may be used, for example, to purify, detect, and target the polypeptides of the present invention, including both in vitro and in vivo diagnostic and therapeutic methods. For example, the antibodies have utility in immunoassays for qualitatively and quantitatively measuring levels of the polypeptides of the present invention in biological samples. See, e.g., Harlow et al., Antibodies: A Laboratory Manual, (Cold Spring Harbor Laboratory Press, 2nd ed. 1988); incorporated by reference herein in its entirety.

[0218] As discussed in more detail below, the antibodies of the present invention may be used either alone or in combination with other compositions. The antibodies may further be recombinantly fused to a heterologous polypeptide at the N- or C-terminus or chemically conjugated (including covalent and non-covalent conjugations) to polypeptides or other compositions. For example, antibodies of the present invention may be recombinantly fused or conjugated to molecules useful as labels in detection assays and effector molecules such as heterologous polypeptides, drugs, radionuclides, or toxins. See, e.g., PCT publications WO 92/08495; WO 91/14438; WO 89/12624; U.S. Pat. No. 5,314,995; and EP 396,387; the disclosures of which are incorporated herein by reference in their entireties.

[0219] The antibodies of the invention include derivatives that are modified, i.e., by the covalent attachment of any type of molecule to the antibody such that covalent attachment does not prevent the antibody from generating an anti-idiotypic response. For example, but not by way of limitation, the antibody derivatives include antibodies that have been modified, e.g., by glycosylation, acetylation, pegylation, phosphylation, amidation, derivatization by known protecting/blocking groups, proteolytic cleavage, linkage to a cellular ligand or other protein, etc. Any of numerous chemical modifications may be carried out by known techniques, including, but not limited to specific chemical cleavage, acetylation, formylation, metabolic synthesis of tunicamycin, etc. Additionally, the derivative may contain one or more non-classical amino acids.

[0220] The antibodies of the present invention may be generated by any suitable method known in the art. Polyclonal antibodies to an antigen-of- interest can be produced by various procedures well known in the art. For example, a polypeptide of the invention can be administered to various host animals including, but not limited to, rabbits, mice, rats, etc. to induce the production of sera containing polyclonal antibodies specific for the antigen. Various adjuvants may be used to increase the immunological response, depending on the host species, and include but are not limited to, Freund's (complete and incomplete), mineral gels such as aluminum hydroxide, surface active substances such as lysolecithin, pluronic polyols, polyanions, peptides, oil emulsions, keyhole limpet hemocyanins, dinitrophenol, and potentially useful human adjuvants such as BCG (bacille Calmette-Guerin) and corynebacterium parvum. Such adjuvants are also well known in the art.

[0221] Monoclonal antibodies can be prepared using a wide variety of techniques known in the art including the use of hybridoma, recombinant, and phage display technologies, or a combination thereof. For example, monoclonal antibodies can be produced using hybridoma techniques including those known in the art and taught, for example, in Harlow et al., Antibodies: A Laboratory Manual, (Cold Spring Harbor Laboratory Press, 2nd ed. 1988); Hammerling, et al., in: Monoclonal Antibodies and T-Cell Hybridomas 563-681 (Elsevier, N.Y., 1981) (said references incorporated by reference in their entireties). The term “monoclonal antibody” as used herein is not limited to antibodies produced through hybridoma technology. The term “monoclonal antibody” refers to an antibody that is derived from a single clone, including any eukaryotic, prokaryotic, or phage clone, and not the method by which it is produced.

[0222] Methods for producing and screening for specific antibodies using hybridoma technology are routine and well known in the art and are discussed in detail in the Examples. In a non-limiting example, mice can be immunized with a polypeptide of the invention or a cell expressing such peptide. Once an immune response is detected, e.g., antibodies specific for the antigen are detected in the mouse serum, the mouse spleen is harvested and splenocytes isolated. The splenocytes are then fused by well known techniques to any suitable myeloma cells, for example cells from cell line SP20 available from the ATCC. Hybridomas are selected and cloned by limited dilution. The hybridoma clones are then assayed by methods known in the art for cells that secrete antibodies capable of binding a polypeptide of the invention. Ascites fluid, which generally contains high levels of antibodies, can be generated by immunizing mice with positive hybridoma clones.

[0223] Accordingly, the present invention provides methods of generating monoclonal antibodies as well as antibodies produced by the method comprising culturing a hybridoma cell secreting an antibody of the invention wherein, preferably, the hybridoma is generated by fusing splenocytes isolated from a mouse immunized with an antigen of the invention with myeloma cells and then screening the hybridomas resulting from the fusion for hybridoma clones that secrete an antibody able to bind a polypeptide of the invention.

[0224] Another well known method for producing both polyclonal and monoclonal human B cell lines is transformation using Epstein Barr Virus (EBV). Protocols for generating EBV-transformed B cell lines are commonly known in the art, such as, for example, the protocol outlined in Chapter 7.22 of Current Protocols in Immunology, Coligan et al., Eds., 1994, John Wiley & Sons, NY, which is hereby incorporated in its entirety by reference herein. The source of B cells for transformation is commonly human peripheral blood, but B cells for transformation may also be derived from other sources including, but not limited to, lymph nodes, tonsil, spleen, tumor tissue, and infected tissues. Tissues are generally made into single cell suspensions prior to EBV transformation. Additionally, steps may be taken to either physically remove or inactivate T cells (e.g., by treatment with cyclosporin A) in B cell-containing samples, because T cells from individuals seropositive for anti-EBV antibodies can suppress B cell immortalization by EBV.

[0225] In general, the sample containing human B cells is innoculated with EBV, and cultured for 3-4 weeks. A typical source of EBV is the culture supernatant of the B95-8 cell line (ATCC #VR-1492). Physical signs of EBV transformation can generally be seen towards the end of the 3-4 week culture period. By phase-contrast microscopy, transformed cells may appear large, clear, hairy and tend to aggregate in tight clusters of cells. Initially, EBV lines are generally polyclonal. However, over prolonged periods of cell cultures, EBV lines may become monoclonal or polyclonal as a result of the selective outgrowth of particular B cell clones. Alternatively, polyclonal EBV transformed lines may be subcloned (e.g., by limiting dilution culture) or fused with a suitable fusion partner and plated at limiting dilution to obtain monoclonal B cell lines. Suitable fusion partners for EBV transformed cell lines include mouse myeloma cell lines (e.g., SP2/0, X63-Ag8.653), heteromyeloma cell lines (human x mouse; e.g., SPAM-8, SBC-H20, and CB-F7), and human cell lines (e.g., GM 1500, SKO-007, RPMI 8226, and KR-4). Thus, the present invention also provides a method of generating polyclonal or monoclonal human antibodies against polypeptides of the invention or fragments thereof, comprising EBV-transformation of human B cells.

[0226] Antibody fragments, which recognize specific epitopes may be generated by known techniques. For example, Fab and F(ab′)2 fragments of the invention may be produced by proteolytic cleavage of immunoglobulin molecules, using enzymes such as papain (to produce Fab fragments) or pepsin (to produce F(ab′)2 fragments). F(ab′)2 fragments contain the variable region, the light chain constant region and the CH1 domain of the heavy chain. For example, the antibodies of the present invention can also be generated using various phage display methods known in the art and as discussed in detail in the Examples (e.g., Example 10). In phage display methods, functional antibody domains are displayed on the surface of phage particles, which carry the polynucleotide sequences encoding them. In a particular embodiment, such phage can be utilized to display antigen binding domains expressed from a repertoire or combinatorial antibody library (e.g., human or murine). Phage expressing an antigen binding domain that binds the antigen of interest can be selected or identified with antigen, e.g., using labeled antigen or antigen bound or captured to a solid surface or bead. Phage used in these methods are typically filamentous phage including fd and M13 binding domains expressed from phage with Fab, Fv or disulfide stabilized Fv antibody domains recombinantly fused to either the phage gene III or gene VIII protein. Examples of phage display methods that can be used to make the antibodies of the present invention include those disclosed in Brinkman et al., J. Immunol. Methods 182:41-50 (1995); Ames et al., J. Immunol. Methods 184:177-186 (1995); Kettleborough et al., Eur. J. Immunol. 24:952-958 (1994); Persic et al., Gene 187 9-18 (1997); Burton et al., Advances in Immunology 57:191-280 (1994); PCT application No. PCT/GB91/01134; PCT publications WO 90/02809; WO 91/10737; WO 92/01047; WO 92/18619; WO 93/11236; WO 95/15982; WO 95/20401; and U.S. Pat. Nos. 5,698,426; 5,223,409; 5,403,484; 5,580,717; 5,427,908; 5,750,753; 5,821,047; 5,571,698; 5,427,908; 5,516,637; 5,780,225; 5,658,727; 5,733,743 and 5,969,108; each of which is incorporated herein by reference in its entirety.

[0227] As described in the above references, after phage selection, the antibody coding regions from the phage can be isolated and used to generate whole antibodies, including human antibodies, or any other desired antigen binding fragment, and expressed in any desired host, including mammalian cells, insect cells, plant cells, yeast, and bacteria, e.g., as described in detail below. For example, techniques to recombinantly produce Fab, Fab′ and F(ab′)2 fragments can also be employed using methods known in the art such as those disclosed in PCT publication WO 92/22324; Mullinax et al., BioTechniques 12(6):864-869 (1992); and Sawai et al., AJRI 34:26-34 (1995); and Better et al., Science 240:1041-1043 (1988) (said references incorporated by reference in their entireties).

[0228] Examples of techniques which can be used to produce single-chain Fvs and antibodies include those described in U.S. Pat. Nos. 4,946,778 and 5,258,498; Huston et al., Methods in Enzymology 203:46-88 (1991); Shu et al., PNAS 90:7995-7999 (1993); and Skerra et al., Science 240:1038-1040 (1988). For some uses, including in vivo use of antibodies in humans and in vitro detection assays, it may be preferable to use chimeric, humanized, or human antibodies. A chimeric antibody is a molecule in which different portions of the antibody are derived from different animal species, such as antibodies having a variable region derived from a murine monoclonal antibody and a human immunoglobulin constant region. Methods for producing chimeric antibodies are known in the art. See e.g., Morrison, Science 229:1202 (1985); Oi et al., BioTechniques 4:214 (1986); Gillies et al., (1989) J. Immunol. Methods 125:191-202; U.S. Pat. Nos. 5,807,715; 4,816,567; and 4,816397, which are incorporated herein by reference in their entirety. Humanized antibodies are antibody molecules from non-human species antibody that binds the desired antigen having one or more complementarity determining regions (CDRs) from the non-human species and a framework regions from a human immunoglobulin molecule. Often, framework residues in the human framework regions will be substituted with the corresponding residue from the CDR donor antibody to alter, preferably improve, antigen binding. These framework substitutions are identified by methods well known in the art, e.g., by modeling of the interactions of the CDR and framework residues to identify framework residues important for antigen binding and sequence comparison to identify unusual framework residues at particular positions. (See, e.g., Queen et al., U.S. Pat. No. 5,585,089; Riechmann et al., Nature 332:323 (1988), which are incorporated herein by reference in their entireties.) Antibodies can be humanized using a variety of techniques known in the art including, for example, CDR-grafting (EP 239,400; PCT publication WO 91/09967; U.S. Pat. Nos. 5,225,539; 5,530,101; and 5,585,089), veneering or resurfacing (EP 592,106; EP 519,596; Padlan, Molecular Immunology 28(4/5):489-498 (1991); Studnicka et al., Protein Engineering 7(6):805-814 (1994); Roguska. et al., PNAS 91:969-973 (1994)), and chain shuffling (U.S. Pat. No. 5,565,332).

[0229] Completely human antibodies are particularly desirable for therapeutic treatment of human patients. Human antibodies can be made by a variety of methods known in the art including phage display methods described above using antibody libraries derived from human immunoglobulin sequences. See also, U.S. Pat. Nos. 4,444,887 and 4,716,111; and PCT publications WO 98/46645, WO 98/50433, WO 98/24893, WO 98/16654, WO 96/34096, WO 96/33735, and WO 91/10741; each of which is incorporated herein by reference in its entirety.

[0230] Human antibodies can also be produced using transgenic mice which are incapable of expressing functional endogenous immunoglobulins, but which can express human immunoglobulin genes. For example, the human heavy and light chain immunoglobulin gene complexes may be introduced randomly or by homologous recombination into mouse embryonic stem cells. Alternatively, the human variable region, constant region, and diversity region may be introduced into mouse embryonic stem cells in addition to the human heavy and light chain genes. The mouse heavy and light chain immunoglobulin genes may be rendered non-functional separately or simultaneously with the introduction of human immunoglobulin loci by homologous recombination. In particular, homozygous deletion of the JH region prevents endogenous antibody production. The modified embryonic stem cells are expanded and microinjected into blastocysts to produce chimeric mice. The chimeric mice are then bred to produce homozygous offspring, which express human antibodies. The transgenic mice are immunized in the normal fashion with a selected antigen, e.g., all or a portion of a polypeptide of the invention. Monoclonal antibodies directed against the antigen can be obtained from the immunized, transgenic mice using conventional hybridoma technology. The human immunoglobulin transgenes harbored by the transgenic mice rearrange during B cell differentiation, and subsequently undergo class switching and somatic mutation. Thus, using such a technique, it is possible to produce therapeutically useful IgG, IgA, IgM and IgE antibodies. For an overview of this technology for producing human antibodies, see Lonberg and Huszar, Int. Rev. Immunol. 13:65-93 (1995). For a detailed discussion of this technology for producing human antibodies and human monoclonal antibodies and protocols for producing such antibodies, see, e.g., PCT publications WO 98/24893; WO 92/01047; WO 96/34096; WO 96/33735; European Patent No. 0 598 877; U.S. Pat. Nos. 5,413,923; 5,625,126; 5,633,425; 5,569,825; 5,661,016; 5,545,806; 5,814,318; 5,885,793; 5,916,771; 5,939,598; 6,075,181 and 6,114,598, which are incorporated by reference herein in their entirety. In addition, companies such as Abgenix, Inc. (Freemont, Calif.) and Genpharm (San Jose, Calif.) can be engaged to provide human antibodies directed against a selected antigen using technology similar to that described above.

[0231] Completely human antibodies which recognize a selected epitope can be generated using a technique referred to as “guided selection.” In this approach a selected non-human monoclonal antibody, e.g., a mouse antibody, is used to guide the selection of a completely human antibody recognizing the same epitope. (Jespers et al., Bio/technology 12:899-903 (1988)).

[0232] Further, antibodies to the polypeptides of the invention can, in turn, be utilized to generate anti-idiotype antibodies that “mimic” polypeptides of the invention using techniques well known to those skilled in the art. (See, e.g., Greenspan & Bona, FASEB J. 7(5):437-444; (1989) and Nissinoff, J. Immunol. 147(8):2429-2438 (1991)). For example, antibodies which bind to and competitively inhibit polypeptide multimerization and/or binding of a polypeptide of the invention to a ligand can be used to generate anti-idiotypes that “mimic” the polypeptide multimerization and/or binding domain and, as a consequence, bind to and neutralize polypeptide and/or its ligand. Such neutralizing anti-idiotypes or Fab fragments of such anti-idiotypes can be used in therapeutic regimens to neutralize polypeptide ligand/receptor. For example, such anti-idiotypic antibodies can be used to bind a polypeptide of the invention and/or to bind its ligand(s)/receptor(s), and thereby block its biological activity. Alternatively, antibodies which bind to and enhance polypeptide multimerization and/or binding, and/or receptor/ligand multimerization, binding and/or signaling can be used to generate anti-idiotypes that function as agonists of a polypeptide of the invention and/or its ligand/receptor. Such agonistic anti-idiotypes or Fab fragments of such anti-idiotypes can be used in therapeutic regimens as agonists of the polypeptides of the invention or its ligand(s)/receptor(s). For example, such anti-idiotypic antibodies can be used to bind a polypeptide of the invention and/or to bind its ligand(s)/receptor(s), and thereby promote or enhance its biological activity.

[0233] Intrabodies of the invention can be produced using methods known in the art, such as those disclosed and reviewed in Chen et al., Hum. Gene Ther. 5:595-601 (1994); Marasco, W. A., Gene Ther. 4:11-15 (1997); Rondon and Marasco, Annu. Rev. Microbiol. 51:257-283 (1997); Proba et al., J. Mol. Biol. 275:245-253 (1998); Cohen et al., Oncogene 17:2445-2456 (1998); Ohage and Steipe, J. Mol. Biol. 291:1119-1128 (1999); Ohage et al., J. Mol. Biol. 291:1129-1134 (1999); Wirtz and Steipe, Protein Sci. 8:2245-2250 (1999); Zhu et al., J. Immunol. Methods 231:207-222 (1999); and references cited therein.

### Polynucleotides Encoding Antibodies

[0234] The invention further provides polynucleotides comprising a nucleotide sequence encoding an antibody of the invention and fragments thereof. The invention also encompasses polynucleotides that hybridize under stringent or alternatively, under lower stringency hybridization conditions, e.g., as defined supra, to polynucleotides that encode an antibody, preferably, that specifically binds to a polypeptide of the invention, preferably, an antibody that binds to a polypeptide having the amino acid sequence of SEQ ID NO:Y, to a polypeptide encoded by a portion of SEQ ID NO:X as defined in columns 8 and 9 of Table 2, and/or to a polypeptide encoded by the cDNA contained in Clone ID NO:Z.

[0235] The polynucleotides may be obtained, and the nucleotide sequence of the polynucleotides determined, by any method known in the art. For example, if the nucleotide sequence of the antibody is known, a polynucleotide encoding the antibody may be assembled from chemically synthesized oligonucleotides (e.g., as described in Kutmeier et al., BioTechniques 17:242 (1994)), which, briefly, involves the synthesis of overlapping oligonucleotides containing portions of the sequence encoding the antibody, annealing and ligating of those oligonucleotides, and then amplification of the ligated oligonucleotides by PCR.

[0236] Alternatively, a polynucleotide encoding an antibody may be generated from nucleic acid from a suitable source. If a clone containing a nucleic acid encoding a particular antibody is not available, but the sequence of the antibody molecule is known, a nucleic acid encoding the immunoglobulin may be chemically synthesized or obtained from a suitable source (e.g., an antibody cDNA library, or a cDNA library generated from, or nucleic acid, preferably poly A+ RNA, isolated from, any tissue or cells expressing the antibody, such as hybridoma cells selected to express an antibody of the invention) by PCR amplification using synthetic primers hybridizable to the 3′ and 5′ ends of the sequence or by cloning using an oligonucleotide probe specific for the particular gene sequence to identify, e.g., a cDNA clone from a cDNA library that encodes the antibody. Amplified nucleic acids generated by PCR may then be cloned into replicable cloning vectors using any method well known in the art.

[0237] Once the nucleotide sequence and corresponding amino acid sequence of the antibody is determined, the nucleotide sequence of the antibody may be manipulated using methods well known in the art for the manipulation of nucleotide sequences, e.g., recombinant DNA techniques, site directed mutagenesis, PCR, etc. (see, for example, the techniques described in Sambrook et al., 1990, Molecular Cloning, A Laboratory Manual, 2d Ed., Cold Spring Harbor Laboratory, Cold Spring Harbor, N.Y. and Ausubel et al., eds., 1998, Current Protocols in Molecular Biology, John Wiley & Sons, NY, which are both incorporated by reference herein in their entireties ), to generate antibodies having a different amino acid sequence, for example to create amino acid substitutions, deletions, and/or insertions.

[0238] In a specific embodiment, the amino acid sequence of the heavy and/or light chain variable domains may be inspected to identify the sequences of the complementarity determining regions (CDRs) by methods that are well know in the art, e.g., by comparison to known amino acid sequences of other heavy and light chain variable regions to determine the regions of sequence hypervariability. Using routine recombinant DNA techniques, one or more of the CDRs may be inserted within framework regions, e.g., into human framework regions to humanize a non-human antibody, as described supra. The framework regions may be naturally occurring or consensus framework regions, and preferably human framework regions (see, e.g., Chothia et al., J. Mol. Biol. 278: 457-479 (1998) for a listing of human framework regions). Preferably, the polynucleotide generated by the combination of the framework regions and CDRs encodes an antibody that specifically binds a polypeptide of the invention. Preferably, as discussed supra, one or more amino acid substitutions may be made within the framework regions, and, preferably, the amino acid substitutions improve binding of the antibody to its antigen. Additionally, such methods may be used to make amino acid substitutions or deletions of one or more variable region cysteine residues participating in an intrachain disulfide bond to generate antibody molecules lacking one or more intrachain disulfide bonds. Other alterations to the polynucleotide are encompassed by the present invention and within the skill of the art.

[0239] In addition, techniques developed for the production of “chimeric antibodies” (Morrison et al., Proc. Natl. Acad. Sci. 81:851-855 (1984); Neuberger et al., Nature 312:604-608 (1984); Takeda et al., Nature 314:452-454 (1985)) by splicing genes from a mouse antibody molecule of appropriate antigen specificity together with genes from a human antibody molecule of appropriate biological activity can be used. As described supra, a chimeric antibody is a molecule in which different portions are derived from different animal species, such as those having a variable region derived from a murine mAb and a human immunoglobulin constant region, e.g., humanized antibodies.

[0240] Alternatively, techniques described for the production of single chain antibodies (U.S. Pat. No. 4,946,778; Bird, Science 242:423-42 (1988); Huston et al., Proc. Natl. Acad. Sci. USA 85:5879-5883 (1988); and Ward et al., Nature 334:544-54 (1989)) can be adapted to produce single chain antibodies. Single chain antibodies are formed by linking the heavy and light chain fragments of the Fv region via an amino acid bridge, resulting in a single chain polypeptide. Techniques for the assembly of functional Fv fragments in E. coli may also be used (Skerra et al., Science 242:1038-1041 (1988)).

### Methods of Producing Antibodies

[0241] The antibodies of the invention can be produced by any method known in the art for the synthesis of antibodies, in particular, by chemical synthesis or preferably, by recombinant expression techniques. Methods of producing antibodies include, but are not limited to, hybridoma technology, EBV transformation, and other methods discussed herein as well as through the use recombinant DNA technology, as discussed below.

[0242] Recombinant expression of an antibody of the invention, or fragment, derivative or analog thereof, (e.g., a heavy or light chain of an antibody of the invention or a single chain antibody of the invention), requires construction of an expression vector containing a polynucleotide that encodes the antibody. Once a polynucleotide encoding an antibody molecule or a heavy or light chain of an antibody, or portion thereof (preferably containing the heavy or light chain variable domain), of the invention has been obtained, the vector for the production of the antibody molecule may be produced by recombinant DNA technology using techniques well known in the art. Thus, methods for preparing a protein by expressing a polynucleotide containing an antibody encoding nucleotide sequence are described herein. Methods which are well known to those skilled in the art can be used to construct expression vectors containing antibody coding sequences and appropriate transcriptional and translational control signals. These methods include, for example, in vitro recombinant DNA techniques, synthetic techniques, and in vivo genetic recombination. The invention, thus, provides replicable vectors comprising a nucleotide sequence encoding an antibody molecule of the invention, or a heavy or light chain thereof, or a heavy or light chain variable domain, operably linked to a promoter. Such vectors may include the nucleotide sequence encoding the constant region of the antibody molecule (see, e.g., PCT Publication WO 86/05807; PCT Publication WO 89/01036; and U.S. Pat. No. 5,122,464) and the variable domain of the antibody may be cloned into such a vector for expression of the entire heavy or light chain.

[0243] The expression vector is transferred to a host cell by conventional techniques and the transfected cells are then cultured by conventional techniques to produce an antibody of the invention. Thus, the invention includes host cells containing a polynucleotide encoding an antibody of the invention, or a heavy or light chain thereof, or a single chain antibody of the invention, operably linked to a heterologous promoter. In preferred embodiments for the expression of double-chained antibodies, vectors encoding both the heavy and light chains may be co-expressed in the host cell for expression of the entire immunoglobulin molecule, as detailed below.

[0244] A variety of host-expression vector systems may be utilized to express the antibody molecules of the invention. Such host-expression systems represent vehicles by which the coding sequences of interest may be produced and subsequently purified, but also represent cells which may, when transformed or transfected with the appropriate nucleotide coding sequences, express an antibody molecule of the invention in situ. These include but are not limited to microorganisms such as bacteria (e.g., E. coli, B. subtilis) transformed with recombinant bacteriophage DNA, plasmid DNA or cosmid DNA expression vectors containing antibody coding sequences; yeast (e.g., Saccharomyces, Pichia) transformed with recombinant yeast expression vectors containing antibody coding sequences; insect cell systems infected with recombinant virus expression vectors (e.g., baculovirus) containing antibody coding sequences; plant cell systems infected with recombinant virus expression vectors (e.g., cauliflower mosaic virus, CaMV; tobacco mosaic virus, TMV) or transformed with recombinant plasmid expression vectors (e.g., Ti plasmid) containing antibody coding sequences; or mammalian cell systems (e.g., COS, CHO, BHK, 293, 3T3 cells) harboring recombinant expression constructs containing promoters derived from the genome of mammalian cells (e.g., metallothionein promoter) or from mammalian viruses (e.g., the adenovirus late promoter; the vaccinia virus 7.5K promoter). Preferably, bacterial cells such as Escherichia coli, and more preferably, eukaryotic cells, especially for the expression of whole recombinant antibody molecule, are used for the expression of a recombinant antibody molecule. For example, mammalian cells such as Chinese hamster ovary cells (CHO), in conjunction with a vector such as the major intermediate early gene promoter element from human cytomegalovirus is an effective expression system for antibodies (Foecking et al., Gene 45:101 (1986); Cockett et al., Bio/Technology 8:2 (1990)).

[0245] In bacterial systems, a number of expression vectors may be advantageously selected depending upon the use intended for the antibody molecule being expressed. For example, when a large quantity of such a protein is to be produced, for the generation of pharmaceutical compositions of an antibody molecule, vectors which direct the expression of high levels of fusion protein products that are readily purified may be desirable. Such vectors include, but are not limited, to the E. coli expression vector pUR278 (Ruther et al., EMBO J. 2:1791 (1983)), in which the antibody coding sequence may be ligated individually into the vector in frame with the lac Z coding region so that a fusion protein is produced; pIN vectors (Inouye & Inouye, Nucleic Acids Res. 13:3101-3109 (1985); Van Heeke & Schuster, J. Biol. Chem. 24:5503-5509 (1989)); and the like. pGEX vectors may also be used to express foreign polypeptides as fusion proteins with glutathione S-transferase (GST). In general, such fusion proteins are soluble and can easily be purified from lysed cells by adsorption and binding to matrix glutathione-agarose beads followed by elution in the presence of free glutathione. The pGEX vectors are designed to include thrombin or factor Xa protease cleavage sites so that the cloned target gene product can be released from the GST moiety.

[0246] In an insect system, Autographa californica nuclear polyhedrosis virus (AcNPV) is used as a vector to express foreign genes. The virus grows in Spodoptera frugiperda cells. The antibody coding sequence may be cloned individually into non-essential regions (for example the polyhedrin gene) of the virus and placed under control of an AcNPV promoter (for example the polyhedrin promoter).

[0247] In mammalian host cells, a number of viral-based expression systems may be utilized. In cases where an adenovirus is used as an expression vector, the antibody coding sequence of interest may be ligated to an adenovirus transcription/translation control complex, e.g., the late promoter and tripartite leader sequence. This chimeric gene may then be inserted in the adenovirus genome by in vitro or in vivo recombination. insertion in a non-essential region of the viral genome (e.g., region E1 or E3) will result in a recombinant virus that is viable and capable of expressing the antibody molecule in infected hosts. (e.g., see Logan & Shenk, Proc. Natl. Acad. Sci. USA 81:355-359 (1984)). Specific initiation signals may also be required for efficient translation of inserted antibody coding sequences. These signals include the ATG initiation codon and adjacent sequences. Furthermore, the initiation codon must be in phase with the reading frame of the desired coding sequence to ensure translation of the entire insert. These exogenous translational control signals and initiation codons can be of a variety of origins, both natural and synthetic. The efficiency of expression may be enhanced by the inclusion of appropriate transcription enhancer elements, transcription terminators, etc. (see Bittner et al., Methods in Enzymol. 153:51-544 (1987)).

[0248] In addition, a host cell strain may be chosen which modulates the expression of the inserted sequences, or modifies and processes the gene product in the specific fashion desired. Such modifications (e.g., glycosylation) and processing (e.g., cleavage) of protein products may be important for the function of the protein. Different host cells have characteristic and specific mechanisms for the post-translational processing and modification of proteins and gene products. Appropriate cell lines or host systems can be chosen to ensure the correct modification and processing of the foreign protein expressed. To this end, eukaryotic host cells which possess the cellular machinery for proper processing of the primary transcript, glycosylation, and phosphorylation of the gene product may be used. Such mammalian host cells include but are not limited to CHO, VERY, BHK, Hela, COS, MDCK, 293, 3T3, W138, and in particular, breast cancer cell lines such as, for example, BT483, Hs578T, HTB2, BT20 and T47D, and normal mammary gland cell line such as, for example, CRL7030 and Hs578Bst.

[0249] For long-term, high-yield production of recombinant proteins, stable expression is preferred. For example, cell lines, which stably express the antibody molecule may be engineered. Rather than using expression vectors which contain viral origins of replication, host cells can be transformed with DNA controlled by appropriate expression control elements (e.g., promoter, enhancer, sequences, transcription terminators, polyadenylation sites, etc.), and a selectable marker. Following the introduction of the foreign DNA, engineered cells may be allowed to grow for 1-2 days in an enriched media, and then are switched to a selective media. The selectable marker in the recombinant plasmid confers resistance to the selection and allows cells to stably integrate the plasmid into their chromosomes and grow to form foci which in turn can be cloned and expanded into cell lines. This method may advantageously be used to engineer cell lines, which express the antibody molecule. Such engineered cell lines may be particularly useful in screening and evaluation of compounds that interact directly or indirectly with the antibody molecule.

[0250] A number of selection systems may be used, including but not limited to the herpes simplex virus thymidine kinase (Wigler et al., Cell 11:223 (1977)), hypoxanthine-guanine phosphoribosyltransferase (Szybalska & Szybalski, Proc. Natl. Acad. Sci. USA 48:202 (1992)), and adenine phosphoribosyltransferase (Lowy et al., Cell 22:817 (1980)) genes can be employed in tk-, hgprt- or aprt- cells, respectively. Also, antimetabolite resistance can be used as the basis of selection for the following genes: dhfr, which confers resistance to methotrexate (Wigler et al., Natl. Acad. Sci. USA 77:357 (1980); O'Hare et al., Proc. Natl. Acad. Sci. USA 78:1527 (1981)); gpt, which confers resistance to mycophenolic acid (Mulligan & Berg, Proc. Natl. Acad. Sci. USA 78:2072 (1981)); neo, which confers resistance to the aminoglycoside G-418 Clinical Pharmacy 12:488-505; Wu and Wu, Biotherapy 3:87-95 (1991); Tolstoshev, Ann. Rev. Pharmacol. Toxicol. 32:573-596 (1993); Mulligan, Science 260:926-932 (1993); and Morgan and Anderson, Ann. Rev. Biochem. 62:191-217 (1993); TIB TECH 11(5):155-215 (1993)); and hygro, which confers resistance to hygromycin (Santerre et al., Gene 30:147 (1984)). Methods commonly known in the art of recombinant DNA technology may be routinely applied to select the desired recombinant clone, and such methods are described, for example, in Ausubel et al. (eds.), Current Protocols in Molecular Biology, John Wiley & Sons, NY (1993); Kriegler, Gene Transfer and Expression, A Laboratory Manual, Stockton Press, NY (1990); and in Chapters 12 and 13, Dracopoli et al. (eds), Current Protocols in Human Genetics, John Wiley & Sons, NY (1994); Colberre-Garapin et al., J. Mol. Biol. 150:1 (1981), which are incorporated by reference herein in their entireties.

[0251] The expression levels of an antibody molecule can be increased by vector amplification (for a review, see Bebbington and Hentschel, The use of vectors based on gene amplification for the expression of cloned genes in mammalian cells in DNA cloning, Vol.3. (Academic Press, New York, 1987)). When a marker in the vector system expressing antibody is amplifiable, increase in the level of inhibitor present in culture of host cell will increase the number of copies of the marker gene. Since the amplified region is associated with the antibody gene, production of the antibody will also increase (Crouse et al., Mol. Cell. Biol. 3:257 (1983)).

[0252] Vectors, which use glutamine synthase (GS) or DHFR as the selectable markers can be amplified in the presence of the drugs methionine sulphoximine or methotrexate, respectively. An advantage of glutamine synthase based vectors are the availabilty of cell lines (e.g., the murine myeloma cell line, NS0) which are glutamine synthase negative. Glutamine synthase expression systems can also function in glutamine synthase expressing cells (e.g., Chinese Hamster Ovary (CHO) cells) by providing additional inhibitor to prevent the functioning of the endogenous gene. A glutamine synthase expression system and components thereof are detailed in PCT publications: WO87/04462; WO86/05807; WO89/01036; WO89/10404; and WO91/06657, which are incorporated in their entireties by reference herein. Additionally, glutamine synthase expression vectors that may be used according to the present invention are commercially available from suppliers, including, for example Lonza Biologics, Inc. (Portsmouth, N.H.). Expression and production of monoclonal antibodies using a GS expression system in murine myeloma cells is described in Bebbington et al., Bio/technology 10:169(1992) and in Biblia and Robinson Biotechnol. Prog. 11:1 (1995) which are incorporated in their entirities by reference herein.

[0253] The host cell may be co-transfected with two expression vectors of the invention, the first vector encoding a heavy chain derived polypeptide and the second vector encoding a light chain derived polypeptide. The two vectors may contain identical selectable markers, which enable equal expression of heavy and light chain polypeptides. Alternatively, a single vector may be used which encodes, and is capable of expressing, both heavy and light chain polypeptides. In such situations, the light chain should be placed before the heavy chain to avoid an excess of toxic free heavy chain (Proudfoot, Nature 322:52 (1986); Kohler, Proc. Natl. Acad. Sci. USA 77:2197 (1980)). The coding sequences for the heavy and light chains may comprise cDNA or genomic DNA.

[0254] Once an antibody molecule of the invention has been produced by an animal, chemically synthesized, or recombinantly expressed, it may be purified by any method known in the art for purification of an immunoglobulin molecule, for example, by chromatography (e.g., ion exchange, affinity, particularly by affinity for the specific antigen after Protein A, and sizing column chromatography), centrifugation, differential solubility, or by any other standard technique for the purification of proteins. In addition, the antibodies of the present invention or fragments thereof can be fused to heterologous polypeptide sequences described herein or otherwise known in the art, to facilitate purification.

[0255] The present invention encompasses antibodies recombinantly fused or chemically conjugated (including both covalently and non-covalently conjugations) to a polypeptide (or portion thereof, preferably at least 10, 20, 30, 40, 50, 60, 70, 80, 90 or 100 amino acids of the polypeptide) of the present invention to generate fusion proteins. The fusion does not necessarily need to be direct, but may occur through linker sequences. The antibodies may be specific for antigens other than polypeptides (or portion thereof, preferably at least 10, 20, 30, 40, 50, 60, 70, 80, 90 or 100 amino acids of the polypeptide) of the present invention. For example, antibodies may be used to target the polypeptides of the present invention to particular cell types, either in vitro or in vivo, by fusing or conjugating the polypeptides of the present invention to antibodies specific for particular cell surface receptors. Antibodies fused or conjugated to the polypeptides of the present invention may also be used in in vitro immunoassays and purification methods using methods known in the art. See e.g., Harbor et al., supra, and PCT publication WO 93/21232; EP 439,095; Naramura et al., Immunol. Lett. 39:91-99 (1994); U.S. Pat. No. 5,474,981; Gillies et al., PNAS 89:1428-1432 (1992); Fell et al., J. Immunol. 146:2446-2452 (1991), which are incorporated by reference in their entireties.

[0256] The present invention further includes compositions comprising the polypeptides of the present invention fused or conjugated to antibody domains other than the variable regions. For example, the polypeptides of the present invention may be fused or conjugated to an antibody Fc region, or portion thereof. The antibody portion fused to a polypeptide of the present invention may comprise the constant region, hinge region, CH1 domain, CH2 domain, and CH3 domain or any combination of whole domains or portions thereof. The polypeptides may also be fused or conjugated to the above antibody portions to form multimers. For example, Fc portions fused to the polypeptides of the present invention can form dimers through disulfide bonding between the Fc portions. Higher multimeric forms can be made by fusing the polypeptides to portions of IgA and IgM. Methods for fusing or conjugating the polypeptides of the present invention to antibody portions are known in the art. See, e.g., U.S. Pat. Nos. 5,336,603; 5,622,929; 5,359,046; 5,349,053; 5,447,851; 5,112,946; EP 307,434; EP 367,166; PCT publications WO 96/04388; WO 91/06570; Ashkenazi et al., Proc. Natl. Acad. Sci. USA 88:10535-10539 (1991); Zheng et al., J. Immunol. 154:5590-5600 (1995); and Vil et al., Proc. Natl. Acad. Sci. USA 89:11337-11341 (1992) (said references incorporated by reference in their entireties).

[0257] As discussed, supra, the polypeptides corresponding to a polypeptide, polypeptide fragment, or a variant of SEQ ID NO:Y may be fused or conjugated to the above antibody portions to increase the in vivo half life of the polypeptides or for use in immunoassays using methods known in the art. Further, the polypeptides corresponding to SEQ ID NO:Y may be fused or conjugated to the above antibody portions to facilitate purification. One reported example describes chimeric proteins consisting of the first two domains of the human CD4-polypeptide and various domains of the constant regions of the heavy or light chains of mammalian immunoglobulins. See EP 394,827; Traunecker et al., Nature 331:84-86 (1988). The polypeptides of the present invention fused or conjugated to an antibody having disulfide- linked dimeric structures (due to the IgG) may also be more efficient in binding and neutralizing other molecules, than the monomeric secreted protein or protein fragment alone. See, for example, Fountoulakis et al., J. Biochem. 270:3958-3964 (1995). In many cases, the Fc part in a fusion protein is beneficial in therapy and diagnosis, and thus can result in, for example, improved pharmacokinetic properties. See, for example, EP A 232,262. Alternatively, deleting the Fc part after the fusion protein has been expressed, detected, and purified, would be desired. For example, the Fc portion may hinder therapy and diagnosis if the fusion protein is used as an antigen for immunizations. In drug discovery, for example, human proteins, such as hIL-5, have been fused with Fc portions for the purpose of high-throughput screening assays to identify antagonists of hIL-5. (See, Bennett et al., J. Molecular Recognition 8:52-58 (1995); Johanson et al., J. Biol. Chem. 270:9459-9471 (1995)).

[0258] Moreover, the antibodies or fragments thereof of the present invention can be fused to marker sequences, such as a peptide to facilitate purification. In preferred embodiments, the marker amino acid sequence is a hexa-histidine peptide, such as the tag provided in a pQE vector (QIAGEN, Inc., 9259 Eton Avenue, Chatsworth, Calif., 91311), among others, many of which are commercially available. As described in Gentz et al., Proc. Natl. Acad. Sci. USA 86:821-824 (1989), for instance, hexa-histidine provides for convenient purification of the fusion protein. Other peptide tags useful for purification include, but are not limited to, the “HA” tag, which corresponds to an epitope derived from the influenza hemagglutinin protein (Wilson et al., Cell 37:767 (1984)) and the “flag” tag.

[0259] The present invention further encompasses antibodies or fragments thereof conjugated to a diagnostic or therapeutic agent. The antibodies can be used diagnostically to, for example, monitor the development or progression of a tumor as part of a clinical testing procedure to, e.g., determine the efficacy of a given treatment regimen. Detection can be facilitated by coupling the antibody to a detectable substance. Examples of detectable substances include various enzymes, prosthetic groups, fluorescent materials, luminescent materials, bioluminescent materials, radioactive materials, positron emitting metals using various positron emission tomographies, and nonradioactive paramagnetic metal ions. The detectable substance may be coupled or conjugated either directly to the antibody (or fragment thereof) or indirectly, through an intermediate (such as, for example, a linker known in the art) using techniques known in the art. See, for example, U.S. Pat. No. 4,741,900 for metal ions which can be conjugated to antibodies for use as diagnostics according to the present invention.

[0260] Further, an antibody or fragment thereof may be conjugated to a therapeutic moiety such as a cytotoxin, e.g., a cytostatic or cytocidal agent, a therapeutic agent or a radioactive metal ion, e.g., alpha-emitters such as, for example, 213Bi. A cytotoxin or cytotoxic agent includes any agent that is detrimental to cells. Examples include paclitaxol, cytochalasin B, gramicidin D, ethidium bromide, emetine, mitomycin, etoposide, tenoposide, vincristine, vinblastine, colchicin, doxorubicin, daunorubicin, dihydroxy anthracin dione, mitoxantrone, mithramycin, actinomycin D, 1-dehydrotestosterone, glucocorticoids, procaine, tetracaine, lidocaine, propranolol, and puromycin and analogs or homologs thereof. Therapeutic agents include, but are not limited to, antimetabolites (e.g., methotrexate, 6-mercaptopurine, 6-thioguanine, cytarabine, 5-fluorouracil decarbazine), alkylating agents (e.g., mechlorethamine, thioepa chlorambucil, melphalan, carmustine (BSNU) and lomustine (CCNU), cyclothosphamide, busulfan, dibromomannitol, streptozotocin, mitomycin C, and cis- dichlorodiamine platinum (II) (DDP) cisplatin), anthracyclines (e.g., daunorubicin (formerly daunomycin) and doxorubicin), antibiotics (e.g., dactinomycin (formerly actinomycin), bleomycin, mithramycin, and anthramycin (AMC)), and anti-mitotic agents (e.g., vincristine and vinblastine).

[0261] The conjugates of the invention can be used for modifying a given biological response, the therapeutic agent or drug moiety is not to be construed as limited to classical chemical therapeutic agents. For example, the drug moiety may be a protein or polypeptide possessing a desired biological activity. Such proteins may include, for example, a toxin such as abrin, ricin A, pseudomonas exotoxin, or diphtheria toxin; a protein such as tumor necrosis factor, a-interferon, β-interferon, nerve growth factor, platelet derived growth factor, tissue plasminogen activator, an apoptotic agent, e.g., TNF-alpha, TNF-beta, AIM I (See, International Publication No. WO 97/33899), AIM II (See, International Publication No. WO 97/34911), Fas Ligand (Takahashi et al., Int. Immunol., 6:1567-1574 (1994)), VEGI (See, International Publication No. WO 99/23105), a thrombotic agent or an anti-angiogenic agent, e.g., angiostatin or endostatin; or, biological response modifiers such as, for example, lymphokines, interleukin-1 (“IL-1”), interleukin-2 (“IL-2”), interleukin-6 (“IL-6”), granulocyte macrophage colony stimulating factor (“GM-CSF”), granulocyte colony stimulating factor (“G-CSF”), or other growth factors.

[0262] Antibodies may also be attached to solid supports, which are particularly useful for immunoassays or purification of the target antigen. Such solid supports include, but are not limited to, glass, cellulose, polyacrylamide, nylon, polystyrene, polyvinyl chloride or polypropylene.

[0263] Techniques for conjugating such therapeutic moiety to antibodies are well known. See, for example, Arnon et al., “Monoclonal Antibodies For Immunotargeting Of Drugs In Cancer Therapy”, in Monoclonal Antibodies And Cancer Therapy, Reisfeld et al. (eds.), pp. 243-56 (Alan R. Liss, Inc. 1985); Hellstrom et al., “Antibodies For Drug Delivery”, in Controlled Drug Delivery (2nd Ed.), Robinson et al. (eds.), pp. 623-53 (Marcel Dekker, Inc. 1987); Thorpe, “Antibody Carriers Of Cytotxic Agents In Cancer Therapy: A Review”, in Monoclonal Antibodies '84: Biolgical And Clinical Applications, Pinchera et al. (eds.), pp. 475-506 (1985); “Analysis, Results, And Future Prospective Of The Therapeutic Use Of Radiolabeled Antibody In Cancer Therapy”, in Monoclonal Antibodies For Cancer Detection And Therapy, Baldwin et al. (eds.), pp. 303-16 (Academic Press 1985), and Thorpe et al., “The Preparation And Cytotoxic Properties Of Antibody-Toxin Conjugates”, Immunol. Rev. 62:119-58 (1982).

[0264] Alternatively, an antibody can be conjugated to a second antibody to form an antibody heteroconjugate as described by Segal in U.S. Pat. No. 4,676,980, which is incorporated herein by reference in its entirety.

[0265] An antibody, with or without a therapeutic moiety conjugated to it, administered alone or in combination with cytotoxic factor(s) and/or cytokine(s) can be used as a therapeutic.

### Immunophenotyping

[0266] The antibodies of the invention may be utilized for immunophenotyping of cell lines and biological samples. Translation products of the genes of the present invention may be useful as cell specific markers, or more specifically as cellular makers that are differentially expressed at various stages of differentiation and/or maturation of particular cell types. Monoclonal antibodies directed against a specific epitope, or combination of epitopes, will allow for the screening of cellular populations expressing the marker. Various techniques can be utilized using monoclonal antibodies to screen for cellular populations expressing the marker(s), and include magnetic separation using antibody-coated magnetic beads, “panning” with antibody attached to a solid matrix (i.e., plate), and flow cytometry (See, e.g., U.S. Pat. No. 5,985,660; and Morrison et al., Cell, 96:737-49 (1999)).

[0267] These techniques allow for the screening of particular populations of cells, such as might be found with hematological malignancies (i.e. minimal residual disease (MRD) in acute leukemic patients) and “non-self” cells in transplantations to prevent Graft-versus-Host Disease (GVHD). Alternatively, these techniques allow for the screening of hematopoietic stem and progenitor cells capable of undergoing proliferation and/or differentiation, as might be found in human umbilical cord blood.

### Assays For Antibody Binding

[0268] The antibodies of the invention may be assayed for immunospecific binding by any method known in the art. The immunoassays which can be used include but are not limited to competitive and non-competitive assay systems using techniques such as western blots, radioimmunoassays, ELISA (enzyme linked immunosorbent assay), “sandwich” immunoassays, immunoprecipitation assays, precipitin reactions, gel diffusion precipitin reactions, immunodiffusion assays, agglutination assays, complement-fixation assays, immunoradiometric assays, fluorescent immunoassays, and protein A immunoassays, to name but a few. Such assays are routine and well known in the art (see, e.g., Ausubel et al, eds, 1994, Current Protocols in Molecular Biology, Vol. 1, John Wiley & Sons, Inc., New York, which is incorporated by reference herein in its entirety). Exemplary immunoassays are described briefly below (but are not intended by way of limitation).

[0269] Immunoprecipitation protocols generally comprise lysing a population of cells in a lysis buffer such as RIPA buffer (1% NP-40 or Triton X-100, 1% sodium deoxycholate, 0.1% SDS, 0.15 M NaCl, 0.01 M sodium phosphate at pH 7.2, 1% Trasylol) supplemented with protein phosphatase and/or protease inhibitors (e.g., EDTA, PMSF, aprotinin, sodium vanadate), adding the antibody of interest to the cell lysate, incubating for a period of time (e.g., 1-4 hours) at 4° C., adding protein A and/or protein G sepharose beads to the cell lysate, incubating for about an hour or more at 4° C., washing the beads in lysis buffer and resuspending the beads in SDS/sample buffer. The ability of the antibody of interest to immunoprecipitate a particular antigen can be assessed by, e.g., western blot analysis. One of skill in the art would be knowledgeable as to the parameters that can be modified to increase the binding of the antibody to an antigen and decrease the background (e.g., pre-clearing the cell lysate with sepharose beads). For further discussion regarding immunoprecipitation protocols see, e.g., Ausubel et al., eds., (1994), Current Protocols in Molecular Biology, Vol. 1, John Wiley & Sons, Inc., New York, section 10.16. 1.

[0270] Western blot analysis generally comprises preparing protein samples, electrophoresis of the protein samples in a polyacrylamide gel (e.g., 8%-20% SDS-PAGE depending on the molecular weight of the antigen), transferring the protein sample from the polyacrylamide gel to a membrane such as nitrocellulose, PVDF or nylon, blocking the membrane in blocking solution (e.g., PBS with 3% BSA or non-fat milk), washing the membrane in washing buffer (e.g., PBS-Tween 20), blocking the membrane with primary antibody (the antibody of interest) diluted in blocking buffer, washing the membrane in washing buffer, blocking the membrane with a secondary antibody (which recognizes the primary antibody, e.g., an anti-human antibody) conjugated to an enzymatic substrate (e.g., horseradish peroxidase or alkaline phosphatase) or radioactive molecule (e.g., 32P or 125I) diluted in blocking buffer, washing the membrane in wash buffer, and detecting the presence of the antigen. One of skill in the art would be knowledgeable as to the parameters that can be modified to increase the signal detected and to reduce the background noise. For further discussion regarding western blot protocols see, e.g., Ausubel et al., eds., (1994), Current Protocols in Molecular Biology, Vol. 1, John Wiley & Sons, Inc., New York, section 10.8.1.

[0271] ELISAs comprise preparing antigen, coating the well of a 96 well microtiter plate with the antigen, adding the antibody of interest conjugated to a detectable compound such as an enzymatic substrate (e.g., horseradish peroxidase or alkaline phosphatase) to the well and incubating for a period of time, and detecting the presence of the antigen. In ELISAs the antibody of interest does not have to be conjugated to a detectable compound; instead, a second antibody (which recognizes the antibody of interest) conjugated to a detectable compound may be added to the well. Further, instead of coating the well with the antigen, the antibody may be coated to the well. In this case, a second antibody conjugated to a detectable compound may be added following the addition of the antigen of interest to the coated well. One of skill in the art would be knowledgeable as to the parameters that can be modified to increase the signal detected as well as other variations of ELISAs known in the art. For further discussion regarding ELISAs see, e.g., Ausubel et al., eds, (1994), Current Protocols in Molecular Biology, Vol. 1, John Wiley & Sons, Inc., New York, section 11.2.1.

[0272] The binding affinity of an antibody to an antigen and the off-rate of an antibody-antigen interaction can be determined by competitive binding assays. One example of a competitive binding assay is a radioimmunoassay comprising the incubation of labeled antigen (e.g., 3H or 125I) with the antibody of interest in the presence of increasing amounts of unlabeled antigen, and the detection of the antibody bound to the labeled antigen. The affinity of the antibody of interest for a particular antigen and the binding off-rates can be determined from the data by scatchard plot analysis. Competition with a second antibody can also be determined using radioimmunoassays. In this case, the antigen is incubated with antibody of interest conjugated to a labeled compound (e.g., 3H or 125I) in the presence of increasing amounts of an unlabeled second antibody.

[0273] Antibodies of the invention may be characterized using immunocytochemisty methods on cells (e.g., mammalian cells, such as CHO cells) transfected with a vector enabling the expression of a liver antigen or with vector alone using techniques commonly known in the art. Antibodies that bind liver antigen transfected cells, but not vector-only transfected cells, are liver antigen specific.

### Therapeutic Uses

[0274] The present invention is further directed to antibody-based therapies which involve administering antibodies of the invention to an animal, preferably a mammal, and most preferably a human, patient for treating one or more of the disclosed diseases, disorders, or conditions. Therapeutic compounds of the invention include, but are not limited to, antibodies of the invention (including fragments, analogs and derivatives thereof as described herein) and nucleic acids encoding antibodies of the invention (including fragments, analogs and derivatives thereof and anti-idiotypic antibodies as described herein). The antibodies of the invention can be used to treat, inhibit or prevent diseases, disorders or conditions associated with aberrant expression and/or activity of a polypeptide of the invention, including, but not limited to, any one or more of the diseases, disorders, or conditions described herein. The treatment and/or prevention of diseases, disorders, or conditions associated with aberrant expression and/or activity of a polypeptide of the invention includes, but is not limited to, alleviating symptoms associated with those diseases, disorders or conditions. Antibodies of the invention may be provided in pharmaceutically acceptable compositions as known in the art or as described herein.

[0275] In a specific and preferred embodiment, the present invention is directed to antibody-based therapies which involve administering antibodies of the invention to an animal, preferably a mammal, and most preferably a human, patient for treating one or more of the diseases, disorders, or conditions of the liver, including, but not limited to, infections (e.g., infections due to viruses, such as, cytomegalovirus, Epstein-Barr, hepatitis A virus, hepatitis B virus, hepatitis non-A, non-B; infections due to fungi; infections due to bacteria; infections due to parasites, such as, Clonorchis sinensis, Echinococcus granulosus, Entamoeba histolytica), inflammations (e.g., cirrhosis, acute hepatitis, granulomatous hepatitis), disorders due to toxin damage (such as, exposure to poisons, drugs (such as, acetaminophen, chlorpromazine), environmental poisons (such as, carbon tetrachloride or vinyl chloride)) (e.g., acute canalicular hepatitis), autoimmune diseases (e.g., Wilson's disease, primary biliary cirrhosis), neoplastic disorders (e.g., adenomas, hemangiomas, hepatocellular carcinoma), and/or as described under “Gastrointestinal Disorders” below. Therapeutic compounds of the invention include, but are not limited to, antibodies of the invention (e.g., antibodies directed to the full length protein expressed on the cell surface of a mammalian cell; antibodies directed to an epitope of a liver associated polypeptide of the invention (such as, a linear epitope (shown in Table 1A, column 6) or a conformational epitope), including fragments, analogs and derivatives thereof as described herein) and nucleic acids encoding antibodies of the invention (including fragments, analogs and derivatives thereof and anti-idiotypic antibodies as described herein). The antibodies of the invention can be used to treat, inhibit or prevent diseases, disorders or conditions associated with aberrant expression and/or activity of a polypeptide of the invention, including, but not limited to, any one or more of the diseases, disorders, or conditions of the liver described herein. The treatment and/or prevention of diseases, disorders, or conditions of the liver associated with aberrant expression and/or activity of a polypeptide of the invention includes, but is not limited to, alleviating symptoms associated with those diseases, disorders or conditions. Antibodies of the invention may be provided in pharmaceutically acceptable compositions as known in the art or as described herein.

[0276] A summary of the ways in which the antibodies of the present invention may be used therapeutically includes binding polynucleotides or polypeptides of the present invention locally or systemically in the body or by direct cytotoxicity of the antibody, e.g. as mediated by complement (CDC) or by effector cells (ADCC). Some of these approaches are described in more detail below. Armed with the teachings provided herein, one of ordinary skill in the art will know how to use the antibodies of the present invention for diagnostic, monitoring or therapeutic purposes without undue experimentation.

[0277] The antibodies of this invention may be advantageously utilized in combination with other monoclonal or chimeric antibodies, or with lymphokines or hematopoietic growth factors (such as, e.g., IL-2, IL-3 and IL-7), for example, which serve to increase the number or activity of effector cells which interact with the antibodies.

[0278] The antibodies of the invention may be administered alone or in combination with other types of treatments (e.g., radiation therapy, chemotherapy, hormonal therapy, immunotherapy and anti-tumor agents). Generally, administration of products of a species origin or species reactivity (in the case of antibodies) that is the same species as that of the patient is preferred. Thus, in a preferred embodiment, human antibodies, fragments derivatives, analogs, or nucleic acids, are administered to a human patient for therapy or prophylaxis.

[0279] It is preferred to use high affinity and/or potent in vivo inhibiting and/or neutralizing antibodies against polypeptides or polynucleotides of the present invention, fragments or regions thereof, for both immunoassays directed to and therapy of disorders related to polynucleotides or polypeptides, including fragments thereof, of the present invention. Such antibodies, fragments, or regions, will preferably have an affinity for polynucleotides or polypeptides of the invention, including fragments thereof. Preferred binding affinities include those with a dissociation constant or Kd less than 5×10⁻² M, 10⁻² M, 5×10⁻³ M, 10⁻³ M, 5×10^{-31 4} M, 10⁻⁴ M, 5×10⁻⁵ M, 10⁻⁵ M, 5×10⁻⁶ M, 10⁻⁶ M, 5×10⁻⁷ M, 10⁻⁷ M, 5×10⁻⁸ M, 10⁻⁸ M, 5×10⁻⁹ M, 10⁻⁹ M, 5×10⁻¹⁰ M, 10⁻¹⁰ M, 5×10⁻¹¹ M, 10⁻¹¹ M, 5×10⁻¹² M, 10⁻¹² M, 5×10⁻¹³ M, 10⁻¹³ M, 5×10⁻¹⁴ M, 10⁻¹⁴ M, 5×10⁻¹⁵ M, and 10⁻¹⁵ M.

### Gene Therapy

[0280] In a specific embodiment, nucleic acids comprising sequences encoding antibodies or functional derivatives thereof, are administered to treat, inhibit or prevent a disease or disorder associated with aberrant expression and/or activity of a polypeptide of the invention, by way of gene therapy. Gene therapy refers to therapy performed by the administration to a subject of an expressed or expressible nucleic acid. In this embodiment of the invention, the nucleic acids produce their encoded protein that mediates a therapeutic effect.

[0281] Any of the methods for gene therapy available in the art can be used according to the present invention. Exemplary methods are described below.

[0282] For general reviews of the methods of gene therapy, see Goldspiel et al., Clinical Pharmacy 12:488-505 (1993); Wu and Wu, Biotherapy 3:87-95 (1991); Tolstoshev, Ann. Rev. Pharmacol. Toxicol. 32:573-596 (1993); Mulligan, Science 260:926-932 (1993); and Morgan and Anderson, Ann. Rev. Biochem. 62:191-217 (1993); May, TIBTECH 11(5):155-215 (1993). Methods commonly known in the art of recombinant DNA technology which can be used are described in Ausubel et al. (eds.), Current Protocols in Molecular Biology, John Wiley & Sons, NY (1993); and Kriegler, Gene Transfer and Expression, A Laboratory Manual, Stockton Press, NY (1990).

[0283] In a preferred embodiment, the compound comprises nucleic acid sequences encoding an antibody, said nucleic acid sequences being part of expression vectors that express the antibody or fragments or chimeric proteins or heavy or light chains thereof in a suitable host. In particular, such nucleic acid sequences have promoters operably linked to the antibody coding region, said promoter being inducible or constitutive, and, optionally, tissue-specific. In another particular embodiment, nucleic acid molecules are used in which the antibody coding sequences and any other desired sequences are flanked by regions that promote homologous recombination at a desired site in the genome, thus providing for intrachromosomal expression of the antibody encoding nucleic acids (Koller and Smithies, Proc. Natl. Acad. Sci. USA 86:8932-8935 (1989); Zijlstra et al., Nature 342:435-438 (1989). In specific embodiments, the expressed antibody molecule is a single chain antibody; alternatively, the nucleic acid sequences include sequences encoding both the heavy and light chains, or fragments thereof, of the antibody.

[0284] Delivery of the nucleic acids into a patient may be either direct, in which case the patient is directly exposed to the nucleic acid or nucleic acid- carrying vectors, or indirect, in which case, cells are first transformed with the nucleic acids in vitro, then transplanted into the patient. These two approaches are known, respectively, as in vivo or ex vivo gene therapy.

[0285] In a specific embodiment, the nucleic acid sequences are directly administered in vivo, where it is expressed to produce the encoded product. This can be accomplished by any of numerous methods known in the art, e.g., by constructing them as part of an appropriate nucleic acid expression vector and administering it so that they become intracellular, e.g., by infection using defective or attenuated retrovirals or other viral vectors (see U.S. Pat. No. 4,980,286), or by direct injection of naked DNA, or by use of microparticle bombardment (e.g., a gene gun; Biolistic, Dupont), or coating with lipids or cell-surface receptors or transfecting agents, encapsulation in liposomes, microparticles, or microcapsules, or by administering them in linkage to a peptide which is known to enter the nucleus, by administering it in linkage to a ligand subject to receptor-mediated endocytosis (see, e.g., Wu and Wu, J. Biol. Chem. 262:4429-4432 (1987)) (which can be used to target cell types specifically expressing the receptors), etc. In another embodiment, nucleic acid-ligand complexes can be formed in which the ligand comprises a fusogenic viral peptide to disrupt endosomes, allowing the nucleic acid to avoid lysosomal degradation. In yet another embodiment, the nucleic acid can be targeted in vivo for cell specific uptake and expression, by targeting a specific receptor (see, e.g., PCT Publications WO 92/06180; WO 92/22635; WO92/20316; WO93/14188, WO 93/20221). Alternatively, the nucleic acid can be introduced intracellularly and incorporated within host cell DNA for expression, by homologous recombination (Koller and Smithies, Proc. Natl. Acad. Sci. USA 86:8932-8935 (1989); Zijlstra et al., Nature 342:435-438 (1989)).

[0286] In a specific embodiment, viral vectors that contains nucleic acid sequences encoding an antibody of the invention are used. For example, a retroviral vector can be used (see Miller et al., Meth. Enzymol. 217:581-599 (1993)). These retroviral vectors contain the components necessary for the correct packaging of the viral genome and integration into the host cell DNA. The nucleic acid sequences encoding the antibody to be used in gene therapy are cloned into one or more vectors, which facilitates delivery of the gene into a patient. More detail about retroviral vectors can be found in Boesen et al., Biotherapy 6:291-302 (1994), which describes the use of a retroviral vector to deliver the mdrl gene to hematopoietic stem cells in order to make the stem cells more resistant to chemotherapy. Other references illustrating the use of retroviral vectors in gene therapy are: Clowes et al., J. Clin. Invest. 93:644-651 (1994); Kiem et al., Blood 83:1467-1473 (1994); Salmons and Gunzberg, Human Gene Therapy 4:129-141 (1993); and Grossman and Wilson, Curr. Opin. in Genetics and Devel. 3:110-114 (1993).

[0287] Adenoviruses are other viral vectors that can be used in gene therapy. Adenoviruses are especially attractive vehicles for delivering genes to respiratory epithelia. Adenoviruses naturally infect respiratory epithelia where they cause a mild disease. Other targets for adenovirus-based delivery systems are liver, the central nervous system, endothelial cells, and muscle. Adenoviruses have the advantage of being capable of infecting non-dividing cells. Kozarsky and Wilson, Current Opinion in Genetics and Development 3:499-503 (1993) present a review of adenovirus-based gene therapy. Bout et al., Human Gene Therapy 5:3-10 (1994) demonstrated the use of adenovirus vectors to transfer genes to the respiratory epithelia of rhesus monkeys. Other instances of the use of adenoviruses in gene therapy can be found in Rosenfeld et al., Science 252:431-434 (1991); Rosenfeld et al., Cell 68:143-155 (1992); Mastrangeli et al., J. Clin. Invest. 91:225-234 (1993); PCT Publication WO94/12649; and Wang, et al., Gene Therapy 2:775-783 (1995). In a preferred embodiment, adenovirus vectors are used.

[0288] Adeno-associated virus (AAV) has also been proposed for use in gene therapy (Walsh et al., Proc. Soc. Exp. Biol. Med. 204:289-300 (1993); U.S. Pat. No. 5,436,146).

[0289] Another approach to gene therapy involves transferring a gene to cells in tissue culture by such methods as electroporation, lipofection, calcium phosphate mediated transfection, or viral infection. Usually, the method of transfer includes the transfer of a selectable marker to the cells. The cells are then placed under selection to isolate those cells that have taken up and are expressing the transferred gene. Those cells are then delivered to a patient.

[0290] In this embodiment, the nucleic acid is introduced into a cell prior to administration in vivo of the resulting recombinant cell. Such introduction can be carried out by any method known in the art, including but not limited to transfection, electroporation, microinjection, infection with a viral or bacteriophage vector containing the nucleic acid sequences, cell fusion, chromosome-mediated gene transfer, microcell-mediated gene transfer, spheroplast fusion, etc. Numerous techniques are known in the art for the introduction of foreign genes into cells (see, e.g., Loeffler and Behr, Meth. Enzymol. 217:599-618 (1993); Cohen et al., Meth. Enzymol. 217:618-644 (1993); Cline, Pharmac. Ther. 29:69-92m (1985) and may be used in accordance with the present invention, provided that the necessary developmental and physiological functions of the recipient cells are not disrupted. The technique should provide for the stable transfer of the nucleic acid to the cell, so that the nucleic acid is expressible by the cell and preferably heritable and expressible by its cell progeny.

[0291] The resulting recombinant cells can be delivered to a patient by various methods known in the art. Recombinant blood cells (e.g., hematopoietic stem or progenitor cells) are preferably administered intravenously. The amount of cells envisioned for use depends on the desired effect, patient state, etc., and can be determined by one skilled in the art.

[0292] Cells into which a nucleic acid can be introduced for purposes of gene therapy encompass any desired, available cell type, and include but are not limited to epithelial cells, endothelial cells, keratinocytes, fibroblasts, muscle cells, hepatocytes; blood cells such as T lymphocytes, B lymphocytes, monocytes, macrophages, neutrophils, eosinophils, megakaryocytes, granulocytes; various stem or progenitor cells, in particular hematopoietic stem or progenitor cells, e.g., as obtained from bone marrow, umbilical cord blood, peripheral blood, fetal liver, etc.

[0293] In a preferred embodiment, the cell used for gene therapy is autologous to the patient.

[0294] In an embodiment in which recombinant cells are used in gene therapy, nucleic acid sequences encoding an antibody are introduced into the cells such that they are expressible by the cells or their progeny, and the recombinant cells are then administered in vivo for therapeutic effect. In a specific embodiment, stem or progenitor cells are used. Any stem and/or progenitor cells which can be isolated and maintained in vitro can potentially be used in accordance with this embodiment of the present invention (see e.g. PCT Publication WO 94/08598; Stemple and Anderson, Cell 71:973-985 (1992); Rheinwald, Meth. Cell Bio. 21A:229 (1980); and Pittelkow and Scott, Mayo Clinic Proc. 61:771 (1986)).

[0295] In a specific embodiment, the nucleic acid to be introduced for purposes of gene therapy comprises an inducible promoter operably linked to the coding region, such that expression of the nucleic acid is controllable by the presence or absence of an appropriate inducer of transcription.

### Demonstration of Therapeutic or Prophylactic Activity

[0296] The compounds or pharmaceutical compositions of the invention are preferably tested in vitro, and then in vivo for the desired therapeutic or prophylactic activity, prior to use in humans. For example, in vitro assays to demonstrate the therapeutic or prophylactic utility of a compound or pharmaceutical composition include, the effect of a compound on a cell line or a patient tissue sample. The effect of the compound or composition on the cell line and/or tissue sample can be determined utilizing techniques known to those of skill in the art including, but not limited to, rosette formation assays and cell lysis assays. In accordance with the invention, in vitro assays which can be used to determine whether administration of a specific compound is indicated, include in vitro cell culture assays in which a patient tissue sample is grown in culture, and exposed to or otherwise administered a compound, and the effect of such compound upon the tissue sample is observed.

### Therapeutic/Prophylactic Administration and Composition

[0297] The invention provides methods of treatment, inhibition and prophylaxis by administration to a subject of an effective amount of a compound or pharmaceutical composition of the invention, preferably a polypeptide or antibody of the invention. In a preferred embodiment, the compound is substantially purified (e.g., substantially free from substances that limit its effect or produce undesired side-effects). The subject is preferably an animal, including but not limited to animals such as cows, pigs, horses, chickens, cats, dogs, etc., and is preferably a mammal, and most preferably human.

[0298] Formulations and methods of administration that can be employed when the compound comprises a nucleic acid or an immunoglobulin are described above; additional appropriate formulations and routes of administration can be selected from among those described herein below.

[0299] Various delivery systems are known and can be used to administer a compound of the invention, e.g., encapsulation in liposomes, microparticles, microcapsules, recombinant cells capable of expressing the compound, receptor-mediated endocytosis (see, e.g., Wu and Wu, J. Biol. Chem. 262:4429-4432 (1987)), construction of a nucleic acid as part of a retroviral or other vector, etc. Methods of introduction include but are not limited to intradermal, intramuscular, intraperitoneal, intravenous, subcutaneous, intranasal, epidural, and oral routes. The compounds or compositions may be administered by any convenient route, for example by infusion or bolus injection, by absorption through epithelial or mucocutaneous linings (e.g., oral mucosa, rectal and intestinal mucosa, etc.) and may be administered together with other biologically active agents. Administration can be systemic or local. In addition, it may be desirable to introduce the pharmaceutical compounds or compositions of the invention into the central nervous system by any suitable route, including intraventricular and intrathecal injection; intraventricular injection may be facilitated by an intraventricular catheter, for example, attached to a reservoir, such as an Ommaya reservoir. Pulmonary administration can also be employed, e.g., by use of an inhaler or nebulizer, and formulation with an aerosolizing agent.

[0300] In a specific embodiment, it may be desirable to administer the pharmaceutical compounds or compositions of the invention locally to the area in need of treatment; this may be achieved by, for example, and not by way of limitation, local infusion during surgery, topical application, e.g., in conjunction with a wound dressing after surgery, by injection, by means of a catheter, by means of a suppository, or by means of an implant, said implant being of a porous, non-porous, or gelatinous material, including membranes, such as sialastic membranes, or fibers. Preferably, when administering a protein, including an antibody, of the invention, care must be taken to use materials to which the protein does not absorb.

[0301] In another embodiment, the compound or composition can be delivered in a vesicle, in particular a liposome (see Langer, Science 249:1527-1533 (1990); Treat et al., in Liposomes in the Therapy of Infectious Disease and Cancer, Lopez-Berestein and Fidler (eds.), Liss, New York, pp. 353-365 (1989); Lopez-Berestein, ibid., pp. 317-327; see generally ibid.)

[0302] In yet another embodiment, the compound or composition can be delivered in a controlled release system. In one embodiment, a pump may be used (see Langer, supra; Sefton, CRC Crit. Ref. Biomed. Eng. 14:201 (1987); Buchwald et al., Surgery 88:507 (1980); Saudek et al., N. Engl. J. Med. 321:574 (1989)). In another embodiment, polymeric materials can be used (see Medical Applications of Controlled Release, Langer and Wise (eds.), CRC Pres., Boca Raton, Florida (1974); Controlled Drug Bioavailability, Drug Product Design and Performance, Smolen and Ball (eds.), Wiley, New York (1984); Ranger and Peppas, J., Macromol. Sci. Rev. Macromol. Chem. 23:61 (1983); see also Levy et al., Science 228:190 (1985); During et al., Ann. Neurol. 25:351 (1989); Howard et al., J. Neurosurg. 71:105 (1989)). In yet another embodiment, a controlled release system can be placed in proximity of the therapeutic target, e.g., the brain, thus requiring only a fraction of the systemic dose (see, e.g., Goodson, in Medical Applications of Controlled Release, supra, vol. 2, pp. 115-138 (1984)).

[0303] Other controlled release systems are discussed in the review by Langer (Science 249:1527-1533 (1990)).

[0304] In a specific embodiment where the compound of the invention is a nucleic acid encoding a protein, the nucleic acid can be administered in vivo to promote expression of its encoded protein, by constructing it as part of an appropriate nucleic acid expression vector and administering it so that it becomes intracellular, e.g., by use of a retroviral vector (see U.S. Pat. No. 4,980,286), or by direct injection, or by use of microparticle bombardment (e.g., a gene gun; Biolistic, Dupont), or coating with lipids or cell-surface receptors or transfecting agents, or by administering it in linkage to a homeobox-like peptide which is known to enter the nucleus (see e.g., Joliot et al., Proc. Natl. Acad. Sci. USA 88:1864-1868 (1991)), etc. Alternatively, a nucleic acid can be introduced intracellularly and incorporated within host cell DNA for expression, by homologous recombination.

[0305] The present invention also provides pharmaceutical compositions. Such compositions comprise a therapeutically effective amount of a compound, and a pharmaceutically acceptable carrier. In a specific embodiment, the term “pharmaceutically acceptable” means approved by a regulatory agency of the Federal or a state government or listed in the U.S. Pharmacopeia or other generally recognized pharmacopeia for use in animals, and more particularly in humans. The term “carrier” refers to a diluent, adjuvant, excipient, or vehicle with which the therapeutic is administered. Such pharmaceutical carriers can be sterile liquids, such as water and oils, including those of petroleum, animal, vegetable or synthetic origin, such as peanut oil, soybean oil, mineral oil, sesame oil and the like. Water is a preferred carrier when the pharmaceutical composition is administered intravenously. Saline solutions and aqueous dextrose and glycerol solutions can also be employed as liquid carriers, particularly for injectable solutions. Suitable pharmaceutical excipients include starch, glucose, lactose, sucrose, gelatin, malt, rice, flour, chalk, silica gel, sodium stearate, glycerol monostearate, talc, sodium chloride, dried skim milk, glycerol, propylene, glycol, water, ethanol and the like. The composition, if desired, can also contain minor amounts of wetting or emulsifying agents, or pH buffering agents. These compositions can take the form of solutions, suspensions, emulsion, tablets, pills, capsules, powders, sustained-release formulations and the like. The composition can be formulated as a suppository, with traditional binders and carriers such as triglycerides. Oral formulation can include standard carriers such as pharmaceutical grades of mannitol, lactose, starch, magnesium stearate, sodium saccharine, cellulose, magnesium carbonate, etc. Examples of suitable pharmaceutical carriers are described in “Remington's Pharmaceutical Sciences” by E. W. Martin. Such compositions will contain a therapeutically effective amount of the compound, preferably in purified form, together with a suitable amount of carrier so as to provide the form for proper administration to the patient. The formulation should suit the mode of administration.

[0306] In a preferred embodiment, the composition is formulated in accordance with routine procedures as a pharmaceutical composition adapted for intravenous administration to human beings. Typically, compositions for intravenous administration are solutions in sterile isotonic aqueous buffer. Where necessary, the composition may also include a solubilizing agent and a local anesthetic such as lignocaine to ease pain at the site of the injection. Generally, the ingredients are supplied either separately or mixed together in unit dosage form, for example, as a dry lyophilized powder or water free concentrate in a hermetically sealed container such as an ampoule or sachette indicating the quantity of active agent. Where the composition is to be administered by infusion, it can be dispensed with an infusion bottle containing sterile pharmaceutical grade water or saline. Where the composition is administered by injection, an ampoule of sterile water for injection or saline can be provided so that the ingredients may be mixed prior to administration.

[0307] The compounds of the invention can be formulated as neutral or salt forms. Pharmaceutically acceptable salts include those formed with anions such as those derived from hydrochloric, phosphoric, acetic, oxalic, tartaric acids, etc., and those formed with cations such as those derived from sodium, potassium, ammonium, calcium, ferric hydroxides, isopropylamine, triethylamine, 2-ethylamino ethanol, histidine, procaine, etc.

[0308] The amount of the compound of the invention, which will be effective in the treatment, inhibition and prevention of a disease or disorder associated with aberrant expression and/or activity of a polypeptide of the invention can be determined by standard clinical techniques. In addition, in vitro assays may optionally be employed to help identify optimal dosage ranges. The precise dose to be employed in the formulation will also depend on the route of administration, and the seriousness of the disease or disorder, and should be decided according to the judgment of the practitioner and each patient's circumstances. Effective doses may be extrapolated from dose-response curves derived from in vitro or animal model test systems.

[0309] For antibodies, the dosage administered to a patient is typically 0.1 mg/kg to 100 mg/kg of the patient's body weight. Preferably, the dosage administered to a patient is between 0.1 mg/kg and 20 mg/kg of the patient's body weight, more preferably 1 mg/kg to 10 mg/kg of the patient's body weight. Generally, human antibodies have a longer half-life within the human body than antibodies from other species due to the immune response to the foreign polypeptides. Thus, lower dosages of human antibodies and less frequent administration is often possible. Further, the dosage and frequency of administration of antibodies of the invention may be reduced by enhancing uptake and tissue penetration (e.g., into the brain) of the antibodies by modifications such as, for example, lipidation.

[0310] The invention also provides a pharmaceutical pack or kit comprising one or more containers filled with one or more of the ingredients of the pharmaceutical compositions of the invention. Optionally associated with such container(s) can be a notice in the form prescribed by a governmental agency regulating the manufacture, use or sale of pharmaceuticals or biological products, which notice reflects approval by the agency of manufacture, use or sale for human administration.

### Diagnosis and Imaging

[0311] Labeled antibodies, and derivatives and analogs thereof, which specifically bind to a polypeptide of interest can be used for diagnostic purposes to detect, diagnose, or monitor diseases, disorders, and/or conditions associated with the aberrant expression and/or activity of a polypeptide of the invention. The invention provides for the detection of aberrant expression of a polypeptide of interest, comprising (a) assaying the expression of the polypeptide of interest in cells or body fluid of an individual using one or more antibodies specific to the polypeptide interest and (b) comparing the level of gene expression with a standard gene expression level, whereby an increase or decrease in the assayed polypeptide gene expression level compared to the standard expression level is indicative of aberrant expression.

[0312] The invention provides a diagnostic assay for diagnosing a liver disorder, comprising (a) assaying the expression of the polypeptide of interest in cells or body fluid of an individual using one or more antibodies specific to the polypeptide interest and (b) comparing the level of gene expression with a standard gene expression level, whereby an increase or decrease in the assayed polypeptide gene expression level compared to the standard expression level is indicative of a particular disorder. With respect to cancer, the presence of a relatively high amount of transcript in biopsied tissue from an individual may indicate a predisposition for the development of the disease, or may provide a means for detecting the disease prior to the appearance of actual clinical symptoms. A more definitive diagnosis of this type may allow health professionals to employ preventative measures or aggressive treatment earlier thereby preventing the development or further progression of the cancer.

[0313] Antibodies of the invention can be used to assay protein levels in a biological sample using classical immunohistological methods known to those of skill in the art (e.g., see Jalkanen et al., J. Cell. Biol. 101:976-985 (1985); Jalkanen et al., J. Cell . Biol. 105:3087-3096 (1987)). Other antibody-based methods useful for detecting protein gene expression include immunoassays, such as the enzyme linked immunosorbent assay (ELISA) and the radioimmunoassay (RIA). Suitable antibody assay labels are known in the art and include enzyme labels, such as, glucose oxidase; radioisotopes, such as iodine (125I, 121I), carbon (14C), sulfur (35S), tritium (3H), indium (112In), and technetium (99Tc); luminescent labels, such as luminol; and fluorescent labels, such as fluorescein and rhodamine, and biotin.

[0314] One facet of the invention is the detection and diagnosis of a disease or disorder associated with aberrant expression of a polypeptide of interest in an animal, preferably a mammal and most preferably a human. A preferred embodiment of the invention is the detection and diagnosis of a disease or disorder of the liver associated with aberrant expression of a liver antigen in an animal, preferably a mammal and most preferably a human. In one embodiment, diagnosis comprises: a) administering (for example, parenterally, subcutaneously, or intraperitoneally) to a subject an effective amount of a labeled molecule which specifically binds to the polypeptide of interest; b) waiting for a time interval following the administering for permitting the labeled molecule to preferentially concentrate at sites in the subject where the polypeptide is expressed (and for unbound labeled molecule to be cleared to background level); c) determining background level; and d) detecting the labeled molecule in the subject, such that detection of labeled molecule above the background level indicates that the subject has a particular disease or disorder associated with aberrant expression of the polypeptide of interest. Background level can be determined by various methods including, comparing the amount of labeled molecule detected to a standard value previously determined for a particular system.

[0315] It will be understood in the art that the size of the subject and the imaging system used will determine the quantity of imaging moiety needed to produce diagnostic images. In the case of a radioisotope moiety, for a human subject, the quantity of radioactivity injected will normally range from about 5 to 20 millicuries of 99mTc. The labeled antibody or antibody fragment will then preferentially accumulate at the location of cells which contain the specific protein. In vivo tumor imaging is described in S. W. Burchiel et al., “Immunopharmacokinetics of Radiolabeled Antibodies and Their Fragments.” (Chapter 13 in Tumor Imaging: The Radiochemical Detection of Cancer, S. W. Burchiel and B. A. Rhodes, eds., Masson Publishing Inc. (1982)).

[0316] Depending on several variables, including the type of label used and the mode of administration, the time interval following the administration for permitting the labeled molecule to preferentially concentrate at sites in the subject and for unbound labeled molecule to be cleared to background level is 6 to 48 hours or 6 to 24 hours or 6 to 12 hours. In another embodiment the time interval following administration is 5 to 20 days or 5 to 10 days.

[0317] In an embodiment, monitoring of the disease or disorder is carried out by repeating the method for diagnosing the disease or disorder, for example, one month after initial diagnosis, six months after initial diagnosis, one year after initial diagnosis, etc.

[0318] Presence of the labeled molecule can be detected in the patient using methods known in the art for in vivo scanning. These methods depend upon the type of label used. Skilled artisans will be able to determine the appropriate method for detecting a particular label. Methods and devices that may be used in the diagnostic methods of the invention include, but are not limited to, computed tomography (CT), whole body scan such as position emission tomography (PET), magnetic resonance imaging (MRI), and sonography.

[0319] In a specific embodiment, the molecule is labeled with a radioisotope and is detected in the patient using a radiation responsive surgical instrument (Thurston et al., U.S. Pat. No. 5,441,050). In another embodiment, the molecule is labeled with a fluorescent compound and is detected in the patient using a fluorescence responsive scanning instrument. In another embodiment, the molecule is labeled with a positron emitting metal and is detected in the patent using positron emission-tomography. In yet another embodiment, the molecule is labeled with a paramagnetic label and is detected in a patient using magnetic resonance imaging (MRI).

### Kits

[0320] The present invention provides kits that can be used in the above methods. In one embodiment, a kit comprises an antibody of the invention, preferably a purified antibody, in one or more containers. In a specific embodiment, the kits of the present invention contain a substantially isolated polypeptide comprising an epitope which is specifically immunoreactive with an antibody included in the kit. Preferably, the kits of the present invention further comprise a control antibody which does not react with the polypeptide of interest. In another specific embodiment, the kits of the present invention contain a means for detecting the binding of an antibody to a polypeptide of interest (e.g., the antibody may be conjugated to a detectable substrate such as a fluorescent compound, an enzymatic substrate, a radioactive compound or a luminescent compound, or a second antibody which recognizes the first antibody may be conjugated to a detectable substrate).

[0321] In another specific embodiment of the present invention, the kit is a diagnostic kit for use in screening serum containing antibodies specific against proliferative and/or cancerous polynucleotides and polypeptides. Such a kit may include a control antibody that does not react with the polypeptide of interest. Such a kit may include a substantially isolated polypeptide antigen comprising an epitope, which is specifically immunoreactive with at least one anti-polypeptide antigen antibody. Further, such a kit includes means for detecting the binding of said antibody to the antigen (e.g., the antibody may be conjugated to a fluorescent compound such as fluorescein or rhodamine, which can be detected by flow cytometry). In specific embodiments, the kit may include a recombinantly produced or chemically synthesized polypeptide antigen. The polypeptide antigen of the kit may also be attached to a solid support.

[0322] In a more specific embodiment the detecting means of the above-described kit includes a solid support to which said polypeptide antigen is attached. Such a kit may also include a non-attached reporter-labeled anti-human antibody. In this embodiment, binding of the antibody to the polypeptide antigen can be detected by binding of the said reporter-labeled antibody.

[0323] In an additional embodiment, the invention includes a diagnostic kit for use in screening serum containing antigens of the polypeptide of the invention. The diagnostic kit includes a substantially isolated antibody specifically immunoreactive with polypeptide or polynucleotide antigens, and means for detecting the binding of the polynucleotide or polypeptide antigen to the antibody. In one embodiment, the antibody is attached to a solid support. In a specific embodiment, the antibody may be a monoclonal antibody. The detecting means of the kit may include a second, labeled monoclonal antibody. Alternatively, or in addition, the detecting means may include a labeled, competing antigen.

[0324] In one diagnostic configuration, test serum is reacted with a solid phase reagent having a surface-bound antigen obtained by the methods of the present invention. After binding with specific antigen antibody to the reagent and removing unbound serum components by washing, the reagent is reacted with reporter-labeled anti-human antibody to bind reporter to the reagent in proportion to the amount of bound anti-antigen antibody on the solid support. The reagent is again washed to remove unbound labeled antibody, and the amount of reporter associated with the reagent is determined. Typically, the reporter is an enzyme, which is detected by incubating the solid phase in the presence of a suitable fluorometric, luminescent or calorimetric substrate (Sigma, St. Louis, Mo.).

[0325] The solid surface reagent in the above assay is prepared by known techniques for attaching protein material to solid support material, such as polymeric beads, dip sticks, 96-well plate or filter material. These attachment methods generally include non-specific adsorption of the protein to the support or covalent attachment of the protein, typically through a free amine group, to a chemically reactive group on the solid support, such as an activated carboxyl, hydroxyl, or aldehyde group. Alternatively, streptavidin coated plates can be used in conjunction with biotinylated antigen(s).

[0326] Thus, the invention provides an assay system or kit for carrying out this diagnostic method. The kit generally includes a support with surface- bound recombinant antigens, and a reporter-labeled anti-human antibody for detecting surface-bound anti-antigen antibody.

### Uses of the Polynucleotides

[0327] Each of the polynucleotides identified herein can be used in numerous ways as reagents. The following description should be considered exemplary and utilizes known techniques.

[0328] The polynucleotides of the present invention are useful for chromosome identification. There exists an ongoing need to identify new chromosome markers, since few chromosome marking reagents, based on actual sequence data (repeat polymorphisms), are presently available. Each sequence is specifically targeted to and can hybridize with a particular location on an individual human chromosome, thus each polynucleotide of the present invention can routinely be used as a chromosome marker using techniques known in the art. Table 1A, column 8 provides the chromosome location of some of the polynucleotides of the invention.

[0329] Briefly, sequences can be mapped to chromosomes by preparing PCR primers (preferably at least 15 bp (e.g., 15-25 bp) from the sequences shown in SEQ ID NO:X. Primers can optionally be selected using computer analysis so that primers do not span more than one predicted exon in the genomic DNA. These primers are then used for PCR screening of somatic cell hybrids containing individual human chromosomes. Only those hybrids containing the human gene corresponding to SEQ ID NO:X will yield an amplified fragment.

[0330] Similarly, somatic hybrids provide a rapid method of PCR mapping the polynucleotides to particular chromosomes. Three or more clones can be assigned per day using a single thermal cycler. Moreover, sublocalization of the polynucleotides can be achieved with panels of specific chromosome fragments. Other gene mapping strategies that can be used include in situ hybridization, prescreening with labeled flow-sorted chromosomes, preselection by hybridization to construct chromosome specific-cDNA libraries, and computer mapping techniques (See, e.g., Shuler, Trends Biotechnol 16:456-459 (1998) which is hereby incorporated by reference in its entiety).

[0331] Precise chromosomal location of the polynucleotides can also be achieved using fluorescence in situ hybridization (FISH) of a metaphase chromosomal spread. This technique uses polynucleotides as short as 500 or 600 bases; however, polynucleotides 2,000-4,000 bp are preferred. For a review of this technique, see Verma et al., “Human Chromosomes: a Manual of Basic Techniques,” Pergamon press, New York (1988).

[0332] For chromosome mapping, the polynucleotides can be used individually (to mark a single chromosome or a single site on that chromosome) or in panels (for marking multiple sites and/or multiple chromosomes).

[0333] Thus, the present invention also provides a method for chromosomal localization which involves (a) preparing PCR primers from the polynucleotide sequences in Table 1A and/or Table 2 and SEQ ID NO:X and (b) screening somatic cell hybrids containing individual chromosomes.

[0334] The polynucleotides of the present invention would likewise be useful for radiation hybrid mapping, HAPPY mapping, and long range restriction mapping. For a review of these techniques and others known in the art, see, e.g. Dear, “Genome Mapping: A Practical Approach,” IRL Press at Oxford University Press, London (1197); Aydin, J. Mol. Med. 77:691-694 (1999); Hacia et al., Mol. Psychiatry 3:483-492 (1998); Herrick et al., Chromosome Res. 7:409-423 (1999); Hamilton et al., Methods Cell Biol. 62:265-280 (2000); and/or Ott, J. Hered. 90:68-70 (1999), each of which is hereby incorporated by reference in its entirety.

[0335] Once a polynucleotide has been mapped to a precise chromosomal location, the physical position of the polynucleotide can be used in linkage analysis. Linkage analysis establishes coinheritance between a chromosomal location and presentation of a particular disease. (Disease mapping data are found, for example, in V. McKusick, Mendelian Inheritance in Man (available on line through Johns Hopkins University Welch Medical Library).) Column 9 of Table 1A provides an OMIM reference identification number of diseases associated with the cytologic band disclosed in column 8 of Table 1A, as determined using techniques described herein and by reference to Table 5. Assuming 1 megabase mapping resolution and one gene per 20 kb, a cDNA precisely localized to a chromosomal region associated with the disease could be one of 50-500 potential causative genes.

[0336] Thus, once coinheritance is established, differences in a polynucleotide of the invention and the corresponding gene between affected and unaffected individuals can be examined. First, visible structural alterations in the chromosomes, such as deletions or translocations, are examined in chromosome spreads or by PCR. If no structural alterations exist, the presence of point mutations are ascertained. Mutations observed in some or all affected individuals, but not in normal individuals, indicate that the mutation may cause the disease. However, complete sequencing of the polypeptide and the corresponding gene from several normal individuals is required to distinguish the mutation from a polymorphism. If a new polymorphism is identified, this polymorphic polypeptide can be used for further linkage analysis.

[0337] Furthermore, increased or decreased expression of the gene in affected individuals as compared to unaffected individuals can be assessed using the polynucleotides of the invention. Any of these alterations (altered expression, chromosomal rearrangement, or mutation) can be used as a diagnostic or prognostic marker. Diagnostic and prognostic methods, kits and reagents encompassed by the present invention are briefly described below and more thoroughly elsewhere herein (see e.g., the sections labeled “Antibodies”, “Diagnostic Assays”, and “Methods for Detecting Liver Disease, Including Cancer”).

[0338] Thus, the invention also provides a diagnostic method useful during diagnosis of a disorder, involving measuring the expression level of polynucleotides of the present invention in cells or body fluid from an individual and comparing the measured gene expression level with a standard level of polynucleotide expression level, whereby an increase or decrease in the gene expression level compared to the standard is indicative of a disorder. Additional non-limiting examples of diagnostic methods encompassed by the present invention are more thoroughly described elsewhere herein (see, e.g., Example 12).

[0339] In still another embodiment, the invention includes a kit for analyzing samples for the presence of proliferative and/or cancerous polynucleotides derived from a test subject, as further described herein. In a general embodiment, the kit includes at least one polynucleotide probe containing a nucleotide sequence that will specifically hybridize with a polynucleotide of the invention and a suitable container. In a specific embodiment, the kit includes two polynucleotide probes defining an internal region of the polynucleotide of the invention, where each probe has one strand containing a 31′ mer-end internal to the region. In a further embodiment, the probes may be useful as primers for polymerase chain reaction amplification.

[0340] Where a diagnosis of a related disorder, including, for example, diagnosis of a tumor, has already been made according to conventional methods, the present invention is useful as a prognostic indicator, whereby patients exhibiting enhanced or depressed polynucleotide of the invention expression will experience a worse clinical outcome relative to patients expressing the gene at a level nearer the standard level.

[0341] By “measuring the expression level of polynucleotides of the invention” is intended qualitatively or quantitatively measuring or estimating the level of the polypeptide of the invention or the level of the mRNA encoding the polypeptide of the invention in a first biological sample either directly (e.g., by determining or estimating absolute protein level or mRNA level) or relatively (e.g., by comparing to the polypeptide level or mRNA level in a second biological sample). Preferably, the polypeptide level or mRNA level in the first biological sample is measured or estimated and compared to a standard polypeptide level or mRNA level, the standard being taken from a second biological sample obtained from an individual not having the related disorder or being determined by averaging levels from a population of individuals not having a related disorder. As will be appreciated in the art, once a standard polypeptide level or mRNA level is known, it can be used repeatedly as a standard for comparison.

[0342] By “biological sample” is intended any biological sample obtained from an individual, body fluid, cell line, tissue culture, or other source which contains polypeptide of the present invention or the corresponding mRNA. As indicated, biological samples include body fluids (such as semen, lymph, vaginal pool, sera, plasma, urine, synovial fluid and spinal fluid) which contain the polypeptide of the present invention, and tissue sources found to express the polypeptide of the present invention. Methods for obtaining tissue biopsies and body fluids from mammals are well known in the art. Where the biological sample is to include mRNA, a tissue biopsy is the preferred source.

[0343] The method(s) provided above may preferably be applied in a diagnostic method and/or kits in which polynucleotides and/or polypeptides of the invention are attached to a solid support. In one exemplary method, the support may be a “gene chip” or a “biological chip” as described in U.S. Pat. Nos. 5,837,832, 5,874,219, and 5,856,174. Further, such a gene chip with polynucleotides of the invention attached may be used to identify polymorphisms between the isolated polynucleotide sequences of the invention, with polynucleotides isolated from a test subject. The knowledge of such polymorphisms (i.e., their location, as well as, their existence) would be beneficial in identifying disease loci for many disorders, such as for example, in neural disorders, immune system disorders, muscular disorders, reproductive disorders, gastrointestinal disorders, pulmonary disorders, digestive disorders, cardiovascular disorders, renal disorders, proliferative disorders, and/or cancerous diseases and conditions. Such a method is described in U.S. Pat. Nos. 5,858,659 and 5,856,104. The U.S. Patents referenced supra are hereby incorporated by reference in their entirety herein.

[0344] The present invention encompasses polynucleotides of the present invention that are chemically synthesized, or reproduced as peptide nucleic acids (PNA), or according to other methods known in the art. The use of PNAs would serve as the preferred form if the polynucleotides of the invention are incorporated onto a solid support, or gene chip. For the purposes of the present invention, a peptide nucleic acid (PNA) is a polyamide type of DNA analog and the monomeric units for adenine, guanine, thymine and cytosine are available commercially (Perceptive Biosystems). Certain components of DNA, such as phosphorus, phosphorus oxides, or deoxyribose derivatives, are not present in PNAs. As disclosed by Nielsen et al., Science 254:1497 (1991); and Egholm et al., Nature 365:666 (1993), PNAs bind specifically and tightly to complementary DNA strands and are not degraded by nucleases. In fact, PNA binds more strongly to DNA than DNA itself does. This is probably because there is no electrostatic repulsion between the two strands, and also the polyamide backbone is more flexible. Because of this, PNA/DNA duplexes bind under a wider range of stringency conditions than DNA/DNA duplexes, making it easier to perform multiplex hybridization. Smaller probes can be used than with DNA due to the strong binding. In addition, it is more likely that single base mismatches can be determined with PNA/DNA hybridization because a single mismatch in a PNA/DNA 15-mer lowers the melting point (T.sub.m) by 8°-20° C., vs. 4°-16° C. for the DNA/DNA 15-mer duplex. Also, the absence of charge groups in PNA means that hybridization can be done at low ionic strengths and reduce possible interference by salt during the analysis.

[0345] The compounds of the present invention have uses which include, but are not limited to, detecting cancer in mammals. In particular the invention is useful during diagnosis of pathological cell proliferative neoplasias which include, but are not limited to: acute myelogenous leukemias including acute monocytic leukemia, acute myeloblastic leukemia, acute promyelocytic leukemia, acute myelomonocytic leukemia, acute erythroleukemia, acute megakaryocytic leukemia, and acute undifferentiated leukemia, etc.; and chronic myelogenous leukemias including chronic myelomonocytic leukemia, chronic granulocytic leukemia, etc. Preferred mammals include monkeys, apes, cats, dogs, cows, pigs, horses, rabbits and humans. Particularly preferred are humans.

[0346] The compounds of the present invention have preferred uses which include, but are not limited to, detecting liver cancer in mammals. In particular the invention is useful during diagnosis of pathological cell proliferative neoplasias, which include, but are not limited to: hepatocellular, hepatoblastoma, hepatocellular carcinoma, cholangiocellular, cholangiocarcinoma, cystadenocarcinoma, tumors of blood vessels, angiosarcoma, Karposi's sarcoma, hemangioendothelioma, other tumors, embryonal sarcoma, fibrosarcoma, leiomyosarcoma, rhabdomyosarcoma, carcinosarcoma, teratoma, carcinoid, squamous carcinoma, primary lymphoma. Preferred mammals include monkeys, apes, cats, dogs, cows, pigs, horses, rabbits and humans. Particularly preferred are humans.

[0347] Pathological cell proliferative disorders are often associated with inappropriate activation of proto-oncogenes. (Gelmann, E. P. et al., “The Etiology of Acute Leukemia: Molecular Genetics and Viral Oncology,” in Neoplastic Diseases of the Blood, Vol 1., Wiernik, P. H. et al. eds., 161-182 (1985)). Neoplasias are now believed to result from the qualitative alteration of a normal cellular gene product, or from the quantitative modification of gene expression by insertion into the chromosome of a viral sequence, by chromosomal translocation of a gene to a more actively transcribed region, or by some other mechanism. (Gelmann et al., supra) It is likely that mutated or altered expression of specific genes is involved in the pathogenesis of some leukemias, among other tissues and cell types. (Gelmann et al., supra) Indeed, the human counterparts of the oncogenes involved in some animal neoplasias have been amplified or translocated in some cases of human leukemia and carcinoma. (Gelmann et al., supra)

[0348] For example, c-myc expression is highly amplified in the non-lymphocytic leukemia cell line HL-60. When HL-60 cells are chemically induced to stop proliferation, the level of c-myc is found to be downregulated. (International Publication Number WO 91/15580). However, it has been shown that exposure of HL-60 cells to a DNA construct that is complementary to the 5′ end of c-myc or c-myb blocks translation of the corresponding mRNAs which downregulates expression of the c-myc or c-myb proteins and causes arrest of cell proliferation and differentiation of the treated cells. (International Publication Number WO 91/15580; Wickstrom et al., Proc. Natl. Acad. Sci. 85:1028 (1988); Anfossi et al., Proc. Natl. Acad. Sci. 86:3379 (1989)). However, the skilled artisan would appreciate the present invention's usefulness is not be limited to treatment, prevention, diagnosis and/or prognosis, of proliferative disorders of cells and tissues of hematopoietic origin, in light of the numerous cells and cell types of varying origins which are known to exhibit proliferative phenotypes. In preferred embodiments, the compounds and/or methods of the invention are used to treat, prevent, diagnose, and/or prognose, proliferative disorders of liver cells and tissues.

[0349] In addition to the foregoing, a polynucleotide of the present invention can be used to control gene expression through triple helix formation or through antisense DNA or RNA. Antisense techniques are discussed, for example, in Okano, J. Neurochem. 56: 560 (1991); “Oligodeoxynucleotides as Antisense Inhibitors of Gene Expression, CRC Press, Boca Raton, Fla. (1988). Triple helix formation is discussed in, for instance Lee et al., Nucleic Acids Research 6: 3073 (1979); Cooney et al., Science 241: 456 (1988); and Dervan et al., Science 251: 1360 (1991). Both methods rely on binding of the polynucleotide to a complementary DNA or RNA. For these techniques, preferred polynucleotides are usually oligonucleotides 20 to 40 bases in length and complementary to either the region of the gene involved in transcription (triple helix—see Lee et al., Nucl. Acids Res. 6:3073 (1979); Cooney et al., Science 241:456 (1988); and Dervan et al., Science 251:1360 (1991)) or to the mRNA itself (antisense—Okano, J. Neurochem. 56:560 (1991); Oligodeoxy-nucleotides as Antisense Inhibitors of Gene Expression, CRC Press, Boca Raton, Fla. (1988).) Triple helix formation optimally results in a shut-off of RNA transcription from DNA, while antisense RNA hybridization blocks translation of an mRNA molecule into polypeptide. The oligonucleotide described above can also be delivered to cells such that the antisense RNA or DNA may be expressed in vivo to inhibit production of polypeptide of the present invention antigens. Both techniques are effective in model systems, and the information disclosed herein can be used to design antisense or triple helix polynucleotides in an effort to treat disease, and in particular, for the treatment of proliferative diseases and/or conditions. Non-limiting antisense and triple helix methods encompassed by the present invention are more thoroughly described elsewhere herein (see, e.g., the section labeled “Antisense and Ribozyme (Antagonists)”).

[0350] Polynucleotides of the present invention are also useful in gene therapy. One goal of gene therapy is to insert a normal gene into an organism having a defective gene, in an effort to correct the genetic defect. The polynucleotides disclosed in the present invention offer a means of targeting such genetic defects in a highly accurate manner. Another goal is to insert a new gene that was not present in the host genome, thereby producing a new trait in the host cell. Additional non-limiting examples of gene therapy methods encompassed by the present invention are more thoroughly described elsewhere herein (see, e.g., the sections labeled “Gene Therapy Methods” and Examples 16, 17 and 18).

[0351] The polynucleotides are also useful for identifying individuals from minute biological samples. The United States military, for example, is considering the use of restriction fragment length polymorphism (RFLP) for identification of its personnel. In this technique, an individual's genomic DNA is digested with one or more restriction enzymes, and probed on a Southern blot to yield unique bands for identifying personnel. This method does not suffer from the current limitations of “Dog Tags” which can be lost, switched, or stolen, making positive identification difficult. The polynucleotides of the present invention can be used as additional DNA markers for RFLP.

[0352] The polynucleotides of the present invention can also be used as an alternative to RFLP, by determining the actual base-by-base DNA sequence of selected portions of an individual's genome. These sequences can be used to prepare PCR primers for amplifying and isolating such selected DNA, which can then be sequenced. Using this technique, individuals can be identified because each individual will have a unique set of DNA sequences. Once an unique ID database is established for an individual, positive identification of that individual, living or dead, can be made from extremely small tissue samples.

[0353] Forensic biology also benefits from using DNA-based identification techniques as disclosed herein. DNA sequences taken from very small biological samples such as tissues, e.g., hair or skin, or body fluids, e.g., blood, saliva, semen, synovial fluid, amniotic fluid, breast milk, lymph, pulmonary sputum or surfactant, urine, fecal matter, etc., can be amplified using PCR. In one prior art technique, gene sequences amplified from polymorphic loci, such as DQa class II HLA gene, are used in forensic biology to identify individuals. (Erlich, H., PCR Technology, Freeman and Co. (1992).) Once these specific polymorphic loci are amplified, they are digested with one or more restriction enzymes, yielding an identifying set of bands on a Southern blot probed with DNA corresponding to the DQa class II HLA gene. Similarly, polynucleotides of the present invention can be used as polymorphic markers for forensic purposes.

[0354] There is also a need for reagents capable of identifying the source of a particular tissue. Such need arises, for example, in forensics when presented with tissue of unknown origin. Appropriate reagents can comprise, for example, DNA probes or primers prepared from the sequences of the present invention, specific to tissues, including but not limited to, those sequences referred to in Table 1A. Panels of such reagents can identify tissue by species and/or by organ type. In a similar fashion, these reagents can be used to screen tissue cultures for contamination. Additional non-limiting examples of such uses are further described herein.

[0355] Because liver antigens are found expressed in the liver, the polynucleotides of the present invention are also useful as hybridization probes for differential identification of the tissue(s) or cell type(s) present in a biological sample. Similarly, polypeptides and antibodies directed to polypeptides of the present invention are useful to provide immunological probes for differential identification of the tissue(s) (e.g., immunohistochemistry assays) or cell type(s) (e.g., immunocytochemistry assays). In a specific embodiment, the polynucleotides of the present invention are also useful as hybridization probes for differential identification of liver tissue(s) or cell type(s) present in a biological sample. Similarly, polypeptides and antibodies directed to polypeptides of the present invention are useful to provide immunological probes for differential identification of liver tissue(s) (e.g., immunohistochemistry assays) or cell type(s) (e.g., immunocytochemistry assays). In addition, for a number of disorders of the above tissues or cells, significantly higher or lower levels of gene expression of the polynucleotides/polypeptides of the present invention may be detected in certain tissues (e.g., tissues expressing polypeptides and/or polynucleotides of the present invention, for example, normal liver or diseased liver tissues, and/or those tissues/cells corresponding to the library source relating to a polynucleotide sequence of the invention as disclosed in column 7 of Table 1A, and/or cancerous and/or wounded tissues) or bodily fluids (e.g., semen, lymph, vaginal pool, serum, plasma, urine, synovial fluid or spinal fluid) taken from an individual having such a disorder, relative to a “standard” gene expression level, i.e., the expression level in healthy tissue from an individual not having the disorder.

[0356] Thus, the invention provides a diagnostic method of a disorder, which involves: (a) assaying gene expression level in cells or body fluid of an individual; (b) comparing the gene expression level with a standard gene expression level, whereby an increase or decrease in the assayed gene expression level compared to the standard expression level is indicative of a disorder.

[0357] In the very least, the polynucleotides of the present invention can be used as molecular weight markers on Southern gels, as diagnostic probes for the presence of a specific mRNA in a particular cell type, as a probe to “subtract-out” known sequences in the process of discovering novel polynucleotides, for selecting and making oligomers for attachment to a “gene chip” or other support, to raise anti-DNA antibodies using DNA immunization techniques, and as an antigen to elicit an immune response.

### Uses of the Polypeptides

[0358] Each of the polypeptides identified herein can be used in numerous ways. The following description should be considered exemplary and utilizes known techniques.

[0359] Polypeptides and antibodies directed to polypeptides of the present invention are useful to provide immunological probes for differential identification of the tissue(s) (e.g., immunohistochemistry assays such as, for example, ABC immunoperoxidase (Hsu et al., J. Histochem. Cytochem. 29:577-580 (1981)) or cell type(s) (e.g., immunocytochemistry assays).

[0360] Antibodies can be used to assay levels of polypeptides encoded by polynucleotides of the invention in a biological sample using classical immunohistological methods known to those of skill in the art (see, e.g., Jalkanen, et al., J. Cell. Biol. 101:976-985 (1985); Jalkanen, et al., J. Cell. Biol. 105:3087-3096 (1987)). Other antibody-based methods useful for detecting protein gene expression include immunoassays, such as the enzyme linked immunosorbent assay (ELISA) and the radioimmunoassay (RIA). Suitable antibody assay labels are known in the art and include enzyme labels, such as, glucose oxidase; radioisotopes, such as iodine (¹³¹I, ¹²⁵I, ¹²³I, ¹²¹I), carbon (¹⁴C), sulfur (³⁵S), tritium (³H), indium (^{115m}In, ^{113m}In, ¹¹²In, ¹¹¹In), and technetium (⁹⁹Tc, ^{99m}Tc), thallium (²⁰¹Ti), gallium (⁶⁸Ga, ⁶⁷Ga), palladium (¹⁰³Pd), molybdenum (⁹⁹Mo), xenon (¹³³Xe), fluorine (¹⁸F), ¹⁵³Sm, ¹⁷⁷Lu, ¹⁵⁹Gd, ¹⁴⁹Pm, ¹⁴⁰La, ¹⁷⁵Yb, ¹⁶⁶Ho, ⁹⁰Y, ⁴⁷Sc, ¹⁸⁶Re, ¹⁸⁸Re, ¹⁴²Pr, ¹⁰⁵Rh ⁹⁷Ru; luminescent labels, such as luminol; and fluorescent labels, such as fluorescein and rhodamine, and biotin.

[0361] In addition to assaying levels of polypeptide of the present invention in a biological sample, proteins can also be detected in vivo by imaging. Antibody labels or markers for in vivo imaging of protein include those detectable by X-radiography, NMR or ESR. For X-radiography, suitable labels include radioisotopes such as barium or cesium, which emit detectable radiation but are not overtly harmful to the subject. Suitable markers for NMR and ESR include those with a detectable characteristic spin, such as deuterium, which may be incorporated into the antibody by labeling of nutrients for the relevant hybridoma.

[0362] A liver antigen-specific antibody or antibody fragment which has been labeled with an appropriate detectable imaging moiety, such as a radioisotope (for example, ¹³¹I, ¹¹²In, ^{99m}Tc, (¹³¹I, ¹²⁵I, ¹²³I, ¹²¹I), carbon (¹⁴C), sulfur (³⁵S), tritium (³H), indium (¹¹⁵In, ¹¹³In, ¹¹²In, ¹¹¹In), and technetium (⁹⁹Tc, ^{99m}Tc), thallium (²⁰¹Ti), gallium (⁶⁸Ga, ⁶⁷Ga), palladium (¹⁰³Pd), molybdenum (⁹⁹Mo), xenon (¹³³Xe), fluorine ¹⁸F, ¹⁵³Sm, ¹⁷⁷Lu, ¹⁵⁹Gd, ¹⁴⁹Pm, ¹⁴⁰La, ¹⁷⁵Yb, ¹⁶⁶Ho, ⁹⁰Y, ⁴⁷Sc, ¹⁸⁶Re, ¹⁸⁸Re, ¹⁴²Pr, ¹⁰⁵Rh, ⁹⁷Ru), a radio-opaque substance, or a material detectable by nuclear magnetic resonance, is introduced (for example, parenterally, subcutaneously or intraperitoneally) into the mammal to be examined for a liver disorder. It will be understood in the art that the size of the subject and the imaging system used will determine the quantity of imaging moiety needed to produce diagnostic images. In the case of a radioisotope moiety, for a human subject, the quantity of radioactivity injected will normally range from about 5 to 20 millicuries of ^{99m}Tc. The labeled antibody or antibody fragment will then preferentially accumulate at the location of cells which express the polypeptide encoded by a polynucleotide of the invention. In vivo tumor imaging is described in S. W. Burchiel et al., “Immunopharmacokinetics of Radiolabeled Antibodies and Their Fragments” (Chapter 13 in Tumor Imaging: The Radiochemical Detection of Cancer, S. W. Burchiel and B. A. Rhodes, eds., Masson Publishing Inc. (1982)).

[0363] In one embodiment, the invention provides a method for the specific delivery of compositions of the invention to cells by administering polypeptides of the invention (e.g., polypeptides encoded by polynucleotides of the invention and/or antibodies) that are associated with heterologous polypeptides or nucleic acids. In one example, the invention provides a method for delivering a therapeutic protein into the targeted cell. In another example, the invention provides a method for delivering a single stranded nucleic acid (e.g., antisense or ribozymes) or double stranded nucleic acid (e.g., DNA that can integrate into the cell's genome or replicate episomally and that can be transcribed) into the targeted cell.

[0364] In another embodiment, the invention provides a method for the specific destruction of cells (e.g., the destruction of tumor cells) by administering polypeptides of the invention in association with toxins or cytotoxic prodrugs.

[0365] In a preferred embodiment, the invention provides a method for the specific destruction of liver cells (e.g., aberrant liver cells, liver neoplasm) by administering polypeptides of the invention (e.g., polypeptides encoded by polynucleotides of the invention and/or antibodies) in association with toxins or cytotoxic prodrugs. In another preferred embodiment the invention provides a method for the specific destruction of tissues/cells corresponding to the library source relating to a polynucleotide sequence of the invention as disclosed in column 7 of Table 1A by administering polypeptides of the invention in association with toxins or cytotoxic prodrugs.

[0366] By “toxin” is meant one or more compounds that bind and activate endogenous cytotoxic effector systems, radioisotopes, holotoxins, modified toxins, catalytic subunits of toxins, or any molecules or enzymes not normally present in or on the surface of a cell that under defined conditions cause the cell's death. Toxins that may be used according to the methods of the invention include, but are not limited to, radioisotopes known in the art, compounds such as, for example, antibodies (or complement fixing containing portions thereof) that bind an inherent or induced endogenous cytotoxic effector system, thymidine kinase, endonuclease, RNAse, alpha toxin, ricin, abrin, Pseudomonas exotoxin A, diphtheria toxin, saporin, momordin, gelonin, pokeweed antiviral protein, alpha-sarcin and cholera toxin. “Toxin” also includes a cytostatic or cytocidal agent, a therapeutic agent or a radioactive metal ion, e.g., alpha-emitters such as, for example, ²¹³Bi, or other radioisotopes such as, for example, ¹⁰³Pd, ¹³³Xe, ^{131 I,} ¹¹¹In, ⁶⁸Ge, ⁵⁷Co, ⁶⁵Zn, ⁸⁵Sr, ³²P, ³⁵S, ⁹⁰Y, ¹⁵³Sm, ¹⁵³Gd, ¹⁶⁹Yb, ⁵¹Cr, ⁵⁴Mn, ⁷⁵Se, ¹¹³Sn, ⁹⁰Yttrium, ¹¹⁷Tin, ¹⁸⁶Rhenium, ¹⁶⁶Holmium, and ¹⁸⁸Rhenium; luminescent labels, such as luminol; and fluorescent labels, such as fluorescein and rhodamine, and biotin.

[0367] In a specific embodiment, the invention provides a method for the specific destruction of cells (e.g., the destruction of tumor cells) by administering polypeptides of the invention or antibodies of the invention in association with the radioisotope ⁹⁰Y. In another specific embodiment, the invention provides a method for the specific destruction of cells (e.g., the destruction of tumor cells) by administering polypeptides of the invention or antibodies of the invention in association with the radioisotope ¹¹¹In. In a further specific embodiment, the invention provides a method for the specific destruction of cells (e.g., the destruction of tumor cells) by administering polypeptides of the invention or antibodies of the invention in association with the radioisotope ¹³¹I.

[0368] Techniques known in the art may be applied to label polypeptides of the invention (including antibodies). Such techniques include, but are not limited to, the use of bifunctional conjugating agents (see e.g., U.S. Pat. Nos. 5,756,065; 5,714,631; 5,696,239; 5,652,361; 5,505,931; 5,489,425; 5,435,990; 5,428,139; 5,342,604; 5,274,119; 4,994,560; and 5,808,003; the contents of each of which are hereby incorporated by reference in its entirety).

[0369] Thus, the invention provides a diagnostic method of a disorder, which involves (a) assaying the expression level of a polypeptide of the present invention in cells or body fluid of an individual; and (b) comparing the assayed polypeptide expression level with a standard polypeptide expression level, whereby an increase or decrease in the assayed polypeptide expression level compared to the standard expression level is indicative of a disorder. With respect to cancer, the presence of a relatively high amount of transcript in biopsied tissue from an individual may indicate a predisposition for the development of the disease, or may provide a means for detecting the disease prior to the appearance of actual clinical symptoms. A more definitive diagnosis of this type may allow health professionals to employ preventative measures or aggressive treatment earlier thereby preventing the development or further progression of the cancer.

[0370] Moreover, polypeptides of the present invention can be used to treat or prevent diseases or conditions of the liver such as, for example, infections (e.g., infections due to viruses, such as, cytomegalovirus, Epstein-Barr, hepatitis A virus, hepatitis B virus, hepatitis non-A, non-B; infections due to fungi; infections due to bacteria; infections due to parasites, such as, Clonorchis sinensis, Echinococcus granulosus, Entamoeba histolytica), inflammations (e.g., cirrhosis, acute hepatitis, granulomatous hepatitis), disorders due to toxin damage (such as, exposure to poisons, drugs (such as, acetaminophen, chlorpromazine), environmental poisons (such as, carbon tetrachloride or vinyl chloride)) (e.g., acute canalicular hepatitis), autoimmune diseases (e.g., Wilson's disease, primary biliary cirrhosis), neoplastic disorders (e.g., adenomas, hemangiomas, hepatocellular carcinoma), and/or as described under “Gastrointestinal Disorders” below. In preferred embodiments, polynucleotides expressed in a particular tissue type (see, e.g., Table 1A, column 7) are used to diagnose, detect, prevent, treat and/or prognose disorders associated with the tissue type. For example, patients can be administered a polypeptide of the present invention in an effort to replace absent or decreased levels of the polypeptide (e.g., insulin), to supplement absent or decreased levels of a different polypeptide (e.g., hemoglobin S for hemoglobin B, SOD, catalase, DNA repair proteins), to inhibit the activity of a polypeptide (e.g., an oncogene or tumor supressor), to activate the activity of a polypeptide (e.g., by binding to a receptor), to reduce the activity of a membrane bound receptor by competing with it for free ligand (e.g., soluble TNF receptors used in reducing inflammation), or to bring about a desired response (e.g., blood vessel growth inhibition, enhancement of the immune response to proliferative cells or tissues).

[0371] Similarly, antibodies directed to a polypeptide of the present invention can also be used to treat disease (as described supra, and elsewhere herein). For example, administration of an antibody directed to a polypeptide of the present invention can bind, and/or neutralize the polypeptide, and/or reduce overproduction of the polypeptide. Similarly, administration of an antibody can activate the polypeptide, such as by binding to a polypeptide bound to a membrane (receptor).

[0372] At the very least, the polypeptides of the present invention can be used as molecular weight markers on SDS-PAGE gels or on molecular sieve gel filtration columns using methods well known to those of skill in the art. Polypeptides can also be used to raise antibodies, which in turn are used to measure protein expression from a recombinant cell, as a way of assessing transformation of the host cell. Moreover, the polypeptides of the present invention can be used to test the biological activities described herein.

### Diagnostic Assays

[0373] The compounds of the present invention are useful for diagnosis, treatment, prevention and/or prognosis of various liver related disorders in mammals, preferably humans. Such disorders include, but are not limited to, infections (e.g., infections due to viruses, such as, cytomegalovirus, Epstein-Barr, hepatitis A virus, hepatitis B virus, hepatitis non-A, non-B; infections due to fungi; infections due to bacteria; infections due to parasites, such as, Clonorchis sinensis, Echinococcus granulosus, Entamoeba histolytica), inflammations (e.g., cirrhosis, acute hepatitis, granulomatous hepatitis), disorders due to toxin damage (such as, exposure to poisons, drugs (such as, acetaminophen, chlorpromazine), environmental poisons (such as, carbon tetrachloride or vinyl chloride)) (e.g., acute canalicular hepatitis), autoimmune diseases (e.g., Wilson's disease, primary biliary cirrhosis), neoplastic disorders (e.g., adenomas, hemangiomas, hepatocellular carcinoma), and/or as described under “Gastrointestinal Disorders” below. In preferred embodiments, polynucleotides expressed in a particular tissue type (see, e.g., Table 1A, column 7) are used to diagnose, detect, prevent, treat and/or prognose disorders associated with the tissue type.

[0374] Liver antigens are expressed in the liver. For a number of liver-related disorders, substantially altered (increased or decreased) levels of liver antigen gene expression can be detected in liver tissue or other cells or bodily fluids (e.g., sera, plasma, urine, semen, synovial fluid or spinal fluid) taken from an individual having such a disorder, relative to a “standard” liver antigen gene expression level, that is, the liver antigen expression level in liver tissues or bodily fluids from an individual not having the liver disorder. Thus, the invention provides a diagnostic method useful during diagnosis of a liver disorder, which involves measuring the expression level of the gene encoding the liver associated polypeptide in liver tissue or other cells or body fluid from an individual and comparing the measured gene expression level with a standard liver antigens gene expression level, whereby an increase or decrease in the gene expression level(s) compared to the standard is indicative of an liver disorder.

[0375] In specific embodiments, the invention provides a diagnostic method useful during diagnosis of a disorder of a normal or diseased tissue/cell source corresponding to column 7 of Table 1A, which involves measuring the expression level of the coding sequence of a polynucleotide sequence associated with this tissue/cell source as disclosed in Table 1A in the tissue/cell source or other cells or body fluid from an individual and comparing the expression level of the coding sequence with a standard expression level of the coding sequence of a polynucleotide sequence, whereby an increase or decrease in the gene expression level(s) compared to the standard is indicative of a disorder of a normal or diseased tissue/cell source corresponding to column 7 of Table 1A.

[0376] In particular, it is believed that certain tissues in mammals with cancer of cells or tissue of the liver express significantly enhanced or reduced levels of normal or altered liver antigen expression and mRNA encoding the liver associated polypeptide when compared to a corresponding “standard” level. Further, it is believed that enhanced or depressed levels of the liver associated polypeptide can be detected in certain body fluids (e.g., sera, plasma, urine, and spinal fluid) or cells or tissue from mammals with such a cancer when compared to sera from mammals of the same species not having the cancer.

[0377] For example, as disclosed herein, liver associated polypeptides of the invention are expressed in the liver. Accordingly, polynucleotides of the invention (e.g., polynucleotide sequences complementary to all or a portion of a liver antigen mRNA nucleotide sequence of SEQ ID NO:X, nucleotide sequence encoding SEQ ID NO:Y, nucleotide sequence encoding a polypeptide encoded by SEQ ID NO:X and/or a nucleotide sequence delineated by columns 8 and 9 of Table 2) and antibodies (and antibody fragments) directed against the polypeptides of the invention may be used to quantitate or qualitate concentrations of cells of the liver expressing liver antigens, preferably on their cell surfaces. These polynucleotides and antibodies additionally have diagnostic applications in detecting abnormalities in the level of liver antigens gene expression, or abnormalities in the structure and/or temporal, tissue, cellular, or subcellular location of liver antigens. These diagnostic assays may be performed in vivo or in vitro, such as, for example, on blood samples, biopsy tissue or autopsy tissue. In specific embodiments, polynucleotides and antibodies of the invention are used to quantitate or qualitate tissues/cells corresponding to the library source disclosed in column 7 of Table 1A expressing the corresponding liver sequence disclosed in the same row of Table 1A, preferably on their cell surface.

[0378] Thus, the invention provides a diagnostic method useful during diagnosis of a liver disorder, including cancers, which involves measuring the expression level of the gene encoding the liver antigen polypeptide in liver tissue or other cells or body fluid from an individual and comparing the measured gene expression level with a standard liver antigen gene expression level, whereby an increase or decrease in the gene expression level compared to the standard is indicative of a liver disorder. In specific embodiments, polynucleotides and antibodies of the invention are used to quantitate or qualitate tissues/cells corresponding to the library source disclosed in column 7 of Table 1A expressing the corresponding liver sequence disclosed in the same row of Table 1A, preferably on their cell surface.

[0379] Where a diagnosis of a disorder in the liver, including diagnosis of a tumor, has already been made according to conventional methods, the present invention is useful as a prognostic indicator, whereby patients exhibiting enhanced or depressed liver antigen gene expression will experience a worse clinical outcome relative to patients expressing the gene at a level nearer the standard level.

[0380] By “assaying the expression level of the gene encoding the liver associated polypeptide” is intended qualitatively or quantitatively measuring or estimating the level of the liver antigen polypeptide or the level of the mRNA encoding the liver antigen polypeptide in a first biological sample either directly (e.g., by determining or estimating absolute protein level or mRNA level) or relatively (e.g., by comparing to the liver associated polypeptide level or mRNA level in a second biological sample). Preferably, the liver antigen polypeptide expression level or mRNA level in the first biological sample is measured or estimated and compared to a standard liver antigen polypeptide level or mRNA level, the standard being taken from a second biological sample obtained from an individual not having the disorder or being determined by averaging levels from a population of individuals not having a disorder of the liver. As will be appreciated in the art, once a standard liver antigen polypeptide level or mRNA level is known, it can be used repeatedly as a standard for comparison.

[0381] By “biological sample” is intended any biological sample obtained from an individual, cell line, tissue culture, or other source containing liver antigen polypeptides (including portions thereof) or mRNA. As indicated, biological samples include body fluids (such as sera, plasma, urine, synovial fluid and spinal fluid) which contain cells expressing liver antigen polypeptides, liver tissue, and other tissue sources found to express the full length or fragments thereof of a liver antigen. Methods for obtaining tissue biopsies and body fluids from mammals are well known in the art. Where the biological sample is to include mRNA, a tissue biopsy is the preferred source.

[0382] Total cellular RNA can be isolated from a biological sample using any suitable technique such as the single-step guanidinium-thiocyanate-phenol-chloroform method described in Chomczynski and Sacchi, Anal. Biochem. 162:156-159 (1987). Levels of mRNA encoding the liver antigen polypeptides are then assayed using any appropriate method. These include Northern blot analysis, SI nuclease mapping, the polymerase chain reaction (PCR), reverse transcription in combination with the polymerase chain reaction (RT-PCR), and reverse transcription in combination with the ligase chain reaction (RT-LCR).

[0383] The present invention also relates to diagnostic assays such as quantitative and diagnostic assays for detecting levels of liver antigen polypeptides, in a biological sample (e.g., cells and tissues), including determination of normal and abnormal levels of polypeptides. Thus, for instance, a diagnostic assay in accordance with the invention for detecting over-expression of liver antigens compared to normal control tissue samples may be used to detect the presence of tumors. Assay techniques that can be used to determine levels of a polypeptide, such as a liver antigen polypeptide of the present invention in a sample derived from a host are well-known to those of skill in the art. Such assay methods include radioimmunoassays, competitive-binding assays, Western Blot analysis and ELISA assays. Assaying liver antigen polypeptide levels in a biological sample can occur using any art-known method.

[0384] Assaying liver antigen polypeptide levels in a biological sample can occur using antibody-based techniques. For example, liver antigen polypeptide expression in tissues can be studied with classical immunohistological methods (Jalkanen et al., J. Cell. Biol. 101:976-985 (1985); Jalkanen, M., et al., J. Cell . Biol. 105:3087-3096 (1987)). Other antibody-based methods useful for detecting liver antigen polypeptide gene expression include immunoassays, such as the enzyme linked immunosorbent assay (ELISA) and the radioimmunoassay (RIA). Suitable antibody assay labels are known in the art and include enzyme labels, such as, glucose oxidase, and radioisotopes, such as iodine (¹²⁵I, ¹²¹I), carbon (¹⁴C), sulfur (³⁵S), tritium (³H), indium (¹¹²In), and technetium (^{99m}Tc), and fluorescent labels, such as fluorescein and rhodamine, and biotin.

[0385] The tissue or cell type to be analyzed will generally include those which are known, or suspected, to express the liver antigen gene (such as, for example, cells of the liver or liver cancer). The protein isolation methods employed herein may, for example, be such as those described in Harlow and Lane (Harlow, E. and Lane, D., 1988, “Antibodies: A Laboratory Manual”, Cold Spring Harbor Laboratory Press, Cold Spring Harbor, New York), which is incorporated herein by reference in its entirety. The isolated cells can be derived from cell culture or from a patient. The analysis of cells taken from culture may be a necessary step in the assessment of cells that could be used as part of a cell-based gene therapy technique or, alternatively, to test the effect of compounds on the expression of the liver antigen gene.

[0386] For example, antibodies, or fragments of antibodies, such as those described herein, may be used to quantitatively or qualitatively detect the presence of liver antigen gene products or conserved variants or peptide fragments thereof. This can be accomplished, for example, by immunofluorescence techniques employing a fluorescently labeled antibody coupled with light microscopic, flow cytometric, or fluorimetric detection.

[0387] In a preferred embodiment, antibodies, or fragments of antibodies directed to any one or all of the predicted epitope domains of the liver antigen polypeptides (Shown in Table 1A, column 6) may be used to quantitatively or qualitatively detect the presence of liver antigen gene products or conserved variants or peptide fragments thereof. This can be accomplished, for example, by immunofluorescence techniques employing a fluorescently labeled antibody coupled with light microscopic, flow cytometric, or fluorimetric detection.

[0388] In an additional preferred embodiment, antibodies, or fragments of antibodies directed to a conformational epitope of a liver antigen may be used to quantitatively or qualitatively detect the presence of liver antigen gene products or conserved variants or peptide fragments thereof. This can be accomplished, for example, by immunofluorescence techniques employing a fluorescently labeled antibody coupled with light microscopic, flow cytometric, or fluorimetric detection.

[0389] The antibodies (or fragments thereof), and/or liver antigen polypeptides of the present invention may, additionally, be employed histologically, as in immunofluorescence, immunoelectron microscopy or non-immunological assays, for in situ detection of liver antigen gene products or conserved variants or peptide fragments thereof. In situ detection may be accomplished by removing a histological specimen from a patient, and applying thereto a labeled antibody or liver antigen polypeptide of the present invention. The antibody (or fragment thereof) or liver antigen polypeptide is preferably applied by overlaying the labeled antibody (or fragment) onto a biological sample. Through the use of such a procedure, it is possible to determine not only the presence of the liver antigen gene product, or conserved variants or peptide fragments, or liver antigen polypeptide binding, but also its distribution in the examined tissue. Using the present invention, those of ordinary skill will readily perceive that any of a wide variety of histological methods (such as staining procedures) can be modified in order to achieve such in situ detection.

[0390] Immunoassays and non-immunoassays for liver antigen gene products or conserved variants or peptide fragments thereof will typically comprise incubating a sample, such as a biological fluid, a tissue extract, freshly harvested cells, or lysates of cells which have been incubated in cell culture, in the presence of a detectably labeled antibody capable of binding liver antigen gene products or conserved variants or peptide fragments thereof, and detecting the bound antibody by any of a number of techniques well-known in the art.

[0391] The biological sample may be brought in contact with and immobilized onto a solid phase support or carrier such as nitrocellulose, or other solid support which is capable of immobilizing cells, cell particles or soluble proteins. The support may then be washed with suitable buffers followed by treatment with the detectably labeled anti-liver antigen antibody or detectable liver antigen polypeptide. The solid phase support may then be washed with the buffer a second time to remove unbound antibody or polypeptide. Optionally the antibody is subsequently labeled. The amount of bound label on solid support may then be detected by conventional means.

[0392] By “solid phase support or carrier” is intended any support capable of binding an antigen or an antibody. Well-known supports or carriers include glass, polystyrene, polypropylene, polyethylene, dextran, nylon, amylases, natural and modified celluloses, polyacrylamides, gabbros, and magnetite. The nature of the carrier can be either soluble to some extent or insoluble for the purposes of the present invention. The support material may have virtually any possible structural configuration so long as the coupled molecule is capable of binding to an antigen or antibody. Thus, the support configuration may be spherical, as in a bead, or cylindrical, as in the inside surface of a test tube, or the external surface of a rod. Alternatively, the surface may be flat such as a sheet, test strip, etc. Preferred supports include polystyrene beads. Those skilled in the art will know many other suitable carriers for binding antibody or antigen, or will be able to ascertain the same by use of routine experimentation.

[0393] The binding activity of a given lot of anti-liver antigen antibody or liver antigen polypeptide may be determined according to well known methods. Those skilled in the art will be able to determine operative and optimal assay conditions for each determination by employing routine experimentation.

[0394] In addition to assaying liver antigen polypeptide levels or polynucleotide levels in a biological sample obtained from an individual, liver antigen polypeptide or polynucleotide can also be detected in vivo by imaging. For example, in one embodiment of the invention, liver antigen polypeptide and/or anti-liver antigen antibodies are used to image diseased cells of the liver, such as neoplasms. In another embodiment, liver antigen polynucleotides of the invention (e.g., polynucleotides complementary to all or a portion of liver antigen mRNA) and/or anti-liver antigen antibodies (e.g., antibodies directed to any one or a combination of the epitopes of liver antigens, antibodies directed to a conformational epitope of liver antigens, antibodies directed to the full length polypeptide expressed on the cell surface of a mammalian cell) are used to image diseased or neoplastic cells of the liver.

[0395] Antibody labels or markers for in vivo imaging of liver antigen polypeptides include those detectable by X-radiography, NMR, MRI, CAT-scans or ESR. For X-radiography, suitable labels include radioisotopes such as barium or cesium, which emit detectable radiation but are not overtly harmful to the subject. Suitable markers for NMR and ESR include those with a detectable characteristic spin, such as deuterium, which may be incorporated into the antibody by labeling of nutrients for the relevant hybridoma. Where in vivo imaging is used to detect enhanced levels of liver antigen polypeptides for diagnosis in humans, it may be preferable to use human antibodies or “humanized” chimeric monoclonal antibodies. Such antibodies can be produced using techniques described herein or otherwise known in the art. For example methods for producing chimeric antibodies are known in the art. See, for review, Morrison, Science 229:1202 (1985); Oi et al., BioTechniques 4:214 (1986); Cabilly et al., U.S. Pat. No. 4,816,567; Taniguchi et al., EP 171496; Morrison et al., EP 173494; Neuberger et al., WO 8601533; Robinson et al., WO 8702671; Boulianne et al., Nature 312:643 (1984); Neuberger et al., Nature 314:268 (1985).

[0396] Additionally, any liver antigen polypeptides whose presence can be detected, can be administered. For example, liver antigen polypeptides labeled with a radio-opaque or other appropriate compound can be administered and visualized in vivo, as discussed, above for labeled antibodies. Further such liver antigen polypeptides can be utilized for in vitro diagnostic procedures.

[0397] A liver antigen polypeptide-specific antibody or antibody fragment which has been labeled with an appropriate detectable imaging moiety, such as a radioisotope (for example, ¹³¹I, ¹¹²In, ^{99m}Tc), a radio-opaque substance, or a material detectable by nuclear magnetic resonance, is introduced (for example, parenterally, subcutaneously or intraperitoneally) into the mammal to be examined for a liver disorder. It will be understood in the art that the size of the subject and the imaging system used will determine the quantity of imaging moiety needed to produce diagnostic images. In the case of a radioisotope moiety, for a human subject, the quantity of radioactivity injected will normally range from about 5 to 20 millicuries of ^{99m}Tc. The labeled antibody or antibody fragment will then preferentially accumulate at the location of cells which contain liver antigen protein. In vivo tumor imaging is described in S. W. Burchiel et al., “Immunopharmacokinetics of Radiolabeled Antibodies and Their Fragments” (Chapter 13 in Tumor Imaging: The Radiochemical Detection of Cancer, S. W. Burchiel and B. A. Rhodes, eds., Masson Publishing Inc. (1982)).

[0398] With respect to antibodies, one of the ways in which the anti-liver antigen antibody can be detectably labeled is by linking the same to an enzyme and using the linked product in an enzyme immunoassay (EIA) (Voller, A., “The Enzyme Linked Immunosorbent Assay (ELISA)”, 1978, Diagnostic Horizons 2:1-7, Microbiological Associates Quarterly Publication, Walkersville, Md.); Voller et al., J. Clin. Pathol. 31:507-520 (1978); Butler, J. E., Meth. Enzymol. 73:482-523 (1981); Maggio, E. (ed.), 1980, Enzyme Immunoassay, CRC Press, Boca Raton, Fla.; Ishikawa, E. et al., (eds.), 1981, Enzyme Immunoassay, Kgaku Shoin, Tokyo). The enzyme, which is bound to the antibody will react with an appropriate substrate, preferably a chromogenic substrate, in such a manner as to produce a chemical moiety which can be detected, for example, by spectrophotometric, fluorimetric or by visual means. Enzymes which can be used to detectably label the antibody include, but are not limited to, malate dehydrogenase, staphylococcal nuclease, delta-5-steroid isomerase, yeast alcohol dehydrogenase, alpha-glycerophosphate, dehydrogenase, triose phosphate isomerase, horseradish peroxidase, alkaline phosphatase, asparaginase, glucose oxidase, beta-galactosidase, ribonuclease, urease, catalase, glucose-6-phosphate dehydrogenase, glucoamylase and acetylcholinesterase. Additionally, the detection can be accomplished by colorimetric methods which employ a chromogenic substrate for the enzyme. Detection may also be accomplished by visual comparison of the extent of enzymatic reaction of a substrate in comparison with similarly prepared standards.

[0399] Detection may also be accomplished using any of a variety of other immunoassays. For example, by radioactively labeling the antibodies or antibody fragments, it is possible to detect liver antigens through the use of a radioimmunoassay (RIA) (see, for example, Weintraub, B., Principles of Radioimmunoassays, Seventh Training Course on Radioligand Assay Techniques, The Endocrine Society, March, 1986, which is incorporated by reference herein). The radioactive isotope can be detected by means including, but not limited to, a gamma counter, a scintillation counter, or autoradiography.

[0400] It is also possible to label the antibody with a fluorescent compound. When the fluorescently labeled antibody is exposed to light of the proper wave length, its presence can then be detected due to fluorescence. Among the most commonly used fluorescent labeling compounds are fluorescein isothiocyanate, rhodamine, phycoerythrin, phycocyanin, allophycocyanin, ophthaldehyde and fluorescamine.

[0401] The antibody can also be detectably labeled using fluorescence emitting metals such as ¹⁵²Eu, or others of the lanthanide series. These metals can be attached to the antibody using such metal chelating groups as diethylenetriaminepentacetic acid (DTPA) or ethylenediaminetetraacetic acid (EDTA).

[0402] The antibody also can be detectably labeled by coupling it to a chemiluminescent compound. The presence of the chemiluminescent-tagged antibody is then determined by detecting the presence of luminescence that arises during the course of a chemical reaction. Examples of particularly useful chemiluminescent labeling compounds are luminol, isoluminol, theromatic acridinium ester, imidazole, acridinium salt and oxalate ester.

[0403] Likewise, a bioluminescent compound may be used to label the antibody of the present invention. Bioluminescence is a type of chemiluminescence found in biological systems in, which a catalytic protein increases the efficiency of the chemiluminescent reaction. The presence of a bioluminescent protein is determined by detecting the presence of luminescence. Important bioluminescent compounds for purposes of labeling are luciferin, luciferase and aequorin.

### Methods for Detecting Liver Diseases Including Cancer

[0404] In general, a liver disease or cancer may be detected in a patient based on the presence of one or more liver antigen proteins of the invention and/or polynucleotides encoding such proteins in a biological sample (for example, blood, sera, urine, and/or tumor biopsies) obtained from the patient. In other words, such proteins and/or polynucleotides may be used as markers to indicate the presence or absence of a liver disease or disorder, including cancer. Cancers that may be diagnosed, and/or prognosed using the compositions of the invention include but are not limited to, liver cancer. In addition, such proteins and/or polynucleotides may be useful for the detection of other diseases and cancers, including cancers of tissues/cells corresponding to the library source disclosed in column 7 of Table 1A expressing the corresponding liver sequence disclosed in the same row of Table 1A. The binding agents provided herein generally permit detection of the level of antigen that binds to the agent in the biological sample. Polynucleotide primers and probes may be used to detect the level of mRNA encoding liver antigen polypeptides, which is also indicative of the presence or absence of a liver disease or disorder, including cancer. In general, liver antigen polypeptides should be present at a level that is at least three fold higher in diseased tissue than in normal tissue.

[0405] There are a variety of assay formats known to those of ordinary skill in the art for using a binding agent to detect polypeptide markers in a sample. See, e.g., Harlow and Lane, supra. In general, the presence or absence of a liver disease in a patient may be determined by (a) contacting a biological sample obtained from a patient with a binding agent; (b) detecting in the sample a level of polypeptide that binds to the binding agent; and (c) comparing the level of polypeptide with a predetermined cut-off value.

[0406] In a preferred embodiment, the assay involves the use of binding agent immobilized on a solid support to bind to and remove the liver antigen polypeptide of the invention from the remainder of the sample. The bound polypeptide may then be detected using a detection reagent that contains a reporter group and specifically binds to the binding agent/polypeptide complex. Such detection reagents may comprise, for example, a binding agent that specifically binds to the polypeptide or an antibody or other agent that specifically binds to the binding agent, such as an anti-immunoglobulin, protein G, protein A or a lectin. Alternatively, a competitive assay may be utilized, in which a polypeptide is labeled with a reporter group and allowed to bind to the immobilized binding agent after incubation of the binding agent with the sample. The extent to which components of the sample inhibit the binding of the labeled polypeptide to the binding agent is indicative of the reactivity of the sample with the immobilized binding agent. Suitable polypeptides for use within such assays include liver antigen polypeptides and portions thereof, or antibodies, to which the binding agent binds, as described above.

[0407] The solid support may be any material known to those of skill in the art to which liver antigen polypeptides of the invention may be attached. For example, the solid support may be a test well in a microtiter plate or a nitrocellulose or other suitable membrane. Alternatively, the support may be a bead or disc, such as glass fiberglass, latex or a plastic material such as polystyrene or polyvinylchloride. The support may also be a magnetic particle or a fiber optic sensor, such as those disclosed, for example, in U.S. Pat. No. 5,359,681. The binding agent may be immobilized on the solid support using a variety of techniques known to those of skill in the art, which are amply described in the patent and scientific literature. In the context of the present invention, the term “immobilization” refers to both noncovalent association, such as adsorption, and covalent attachment (which may be a direct linkage between the agent and functional groups on the support or may be a linkage by way of a cross-linking agent). Immobilization by adsorption to a well in a microtiter plate or to a membrane is preferred. In such cases, adsorption may be achieved by contacting the binding agent, in a suitable buffer, with the solid support for the suitable amount of time. The contact time varies with temperature, but is typically between about 1 hour and about 1 day. In general, contacting a well of plastic microtiter plate (such as polystyrene or polyvinylchloride) with an amount of binding agent ranging from about 10 ng to about 10 ug, and preferably about 100 ng to about 1 ug, is sufficient to immobilize an adequate amount of binding agent.

[0408] Covalent attachment of binding agent to a solid support may generally be achieved by first reacting the support with a bifunctional reagent that will react with both the support and a functional group, such as a hydroxyl or amino group, on the binding agent. For example, the binding agent may be covalently attached to supports having an appropriate polymer coating using benzoquinone or by condensation of an aldehyde group on the support with an amine and an active hydrogen on the binding partner (see, e.g., Pierce Immunotechnology Catalog and Handbook, 1991, at A12-A13).

### Gene Therapy Methods

[0409] Also encompassed by the present invention are gene therapy methods for treating or preventing disorders, diseases and conditions. The gene therapy methods relate to the introduction of nucleic acid (DNA, RNA and antisense DNA or RNA) sequences into an animal to achieve expression of a liver antigen of the present invention. This method requires a polynucleotide which codes for a polypeptide of the present invention operatively linked to a promoter and any other genetic elements necessary for the expression of the polypeptide by the target tissue. Such gene therapy and delivery techniques are known in the art, see, for example, WO90/11092, which is herein incorporated by reference.

[0410] Thus, for example, cells from a patient may be engineered with a polynucleotide (DNA or RNA) comprising a promoter operably linked to a polynucleotide of the present invention ex vivo, with the engineered cells then being provided to a patient to be treated with the polypeptide of the present invention. Such methods are well-known in the art. For example, see Belldegrun, A., et al., J. Natl.

[0411] Cancer Inst. 85: 207-216 (1993); Ferrantini, M. et al., Cancer Research 53: 1107-1112 (1993); Ferrantini, M. et al., J. Immunology 153: 4604-4615 (1994); Kaido, T., et al., Int. J. Cancer 60: 221-229 (1995); Ogura, H., et al., Cancer Research 50: 5102-5106 (1990); Santodonato, L., et al., Human Gene Therapy 7:1-10 (1996); Santodonato, L., et al., Gene Therapy 4:1246-1255 (1997); and Zhang, J. -F. et al., Cancer Gene Therapy 3: 31-38 (1996)), which are herein incorporated by reference. In one embodiment, the cells, which are engineered are arterial cells. The arterial cells may be reintroduced into the patient through direct injection to the artery, the tissues surrounding the artery, or through catheter injection.

[0412] As discussed in more detail below, the polynucleotide constructs can be delivered by any method that delivers injectable materials to the cells of an animal, such as, injection into the interstitial space of tissues (heart, muscle, skin, lung, liver, and the like). The polynucleotide constructs may be delivered in a pharmaceutically acceptable liquid or aqueous carrier.

[0413] In one embodiment, the polynucleotide of the present invention is delivered as a naked polynucleotide. The term “naked” polynucleotide, DNA or RNA refers to sequences that are free from any delivery vehicle that acts to assist, promote or facilitate entry into the cell, including viral sequences, viral particles, liposome formulations, lipofectin or precipitating agents and the like. However, the polynucleotide of the present invention can also be delivered in liposome formulations and lipofectin formulations and the like can be prepared by methods well known to those skilled in the art. Such methods are described, for example, in U.S. Pat. Nos. 5,593,972, 5,589,466, and 5,580,859, which are herein incorporated by reference.

[0414] The polynucleotide vector constructs used in the gene therapy method are preferably constructs that will not integrate into the host genome nor will they contain sequences that allow for replication. Appropriate vectors include pWLNEO, pSV2CAT, pOG44, pXT1 and pSG available from Stratagene; pSVK3, pBPV, pMSG and pSVL available from Pharmacia; and pEF1/V5, pcDNA3.1, and pRc/CMV2 available from Invitrogen. Other suitable vectors will be readily apparent to the skilled artisan.

[0415] Any strong promoter known to those skilled in the art can be used for driving the expression of the polynucleotide sequence. Suitable promoters include adenoviral promoters, such as the adenoviral major late promoter; or heterologous promoters, such as the cytomegalovirus (CMV) promoter; the respiratory syncytial virus (RSV) promoter; inducible promoters, such as the MMT promoter, the metallothionein promoter; heat shock promoters; the albumin promoter; the ApoAI promoter; human globin promoters; viral thymidine kinase promoters, such as the Herpes Simplex thymidine kinase promoter; retroviral LTRs; the b-actin promoter; and human growth hormone promoters. The promoter also may be the native promoter for the polynucleotide of the present invention.

[0416] Unlike other gene therapy techniques, one major advantage of introducing naked nucleic acid sequences into target cells is the transitory nature of the polynucleotide synthesis in the cells. Studies have shown that non-replicating DNA sequences can be introduced into cells to provide production of the desired polypeptide for periods of up to six months.

[0417] The polynucleotide construct can be delivered to the interstitial space of tissues within the an animal, including of muscle, skin, brain, lung, liver, spleen, bone marrow, thymus, heart, lymph, blood, bone, cartilage, pancreas, kidney, gall bladder, stomach, intestine, testis, ovary, uterus, rectum, nervous system, eye, gland, and connective tissue. Interstitial space of the tissues comprises the intercellular, fluid, mucopolysaccharide matrix among the reticular fibers of organ tissues, elastic fibers in the walls of vessels or chambers, collagen fibers of fibrous tissues, or that same matrix within connective tissue ensheathing muscle cells or in the lacunae of bone. It is similarly the space occupied by the plasma of the circulation and the lymph fluid of the lymphatic channels. Delivery to the interstitial space of muscle tissue is preferred for the reasons discussed below. They may be conveniently delivered by injection into the tissues comprising these cells. They are preferably delivered to and expressed in persistent, non-dividing cells which are differentiated, although delivery and expression may be achieved in non-differentiated or less completely differentiated cells, such as, for example, stem cells of blood or skin fibroblasts. In vivo muscle cells are particularly competent in their ability to take up and express polynucleotides.

[0418] For the naked nucleic acid sequence injection, an effective dosage amount of DNA or RNA will be in the range of from about 0.05 mg/kg body weight to about 50 mg/kg body weight. Preferably the dosage will be from about 0.005 mg/kg to about 20 mg/kg and more preferably from about 0.05 mg/kg to about 5 mg/kg. Of course, as the artisan of ordinary skill will appreciate, this dosage will vary according to the tissue site of injection. The appropriate and effective dosage of nucleic acid sequence can readily be determined by those of ordinary skill in the art and may depend on the condition being treated and the route of administration.

[0419] The preferred route of administration is by the parenteral route of injection into the interstitial space of tissues. However, other parenteral routes may also be used, such as, inhalation of an aerosol formulation particularly for delivery to lungs or bronchial tissues, throat or mucous membranes of the nose. In addition, naked DNA constructs can be delivered to arteries during angioplasty by the catheter used in the procedure.

[0420] The naked polynucleotides are delivered by any method known in the art, including, but not limited to, direct needle injection at the delivery site, intravenous injection, topical administration, catheter infusion, and so-called “gene guns”. These delivery methods are known in the art.

[0421] The constructs may also be delivered with delivery vehicles such as viral sequences, viral particles, liposome formulations, lipofectin, precipitating agents, etc. Such methods of delivery are known in the art.

[0422] In certain embodiments, the polynucleotide constructs are complexed in a liposome preparation. Liposomal preparations for use in the instant invention include cationic (positively charged), anionic (negatively charged) and neutral preparations. However, cationic liposomes are particularly preferred because a tight charge complex can be formed between the cationic liposome and the polyanionic nucleic acid. Cationic liposomes have been shown to mediate intracellular delivery of plasmid DNA (Feigner et al., Proc. Natl. Acad. Sci. USA (1987) 84:7413-7416, which is herein incorporated by reference); mRNA (Malone et al., Proc. Natl. Acad. Sci. USA (1989) 86:6077-6081, which is herein incorporated by reference); and purified transcription factors (Debs et al., J. Biol. Chem. (1990) 265:10189-10192, which is herein incorporated by reference), in functional form.

[0423] Cationic liposomes are readily available. For example, N[1-2,3-dioleyloxy)propyl]-N,N,N-triethylammonium (DOTMA) liposomes are particularly useful and are available under the trademark Lipofectin, from GIBCO BRL, Grand Island, N.Y., (see, also, Felgner et al., Proc. Natl Acad. Sci. USA (1987) 84:7413-7416, which is herein incorporated by reference). Other commercially available liposomes include transfectace (DDAB/DOPE) and DOTAP/DOPE (Boehringer).

[0424] Other cationic liposomes can be prepared from readily available materials using techniques well known in the art. See, e.g. PCT Publication No. WO 90/11092 (which is herein incorporated by reference) for a description of the synthesis of DOTAP (1,2-bis(oleoyloxy)-3-(trimethylammonio)propane) liposomes. Preparation of DOTMA liposomes is explained in the literature, see, e.g., P. Felgner et al., Proc. Natl. Acad Sci. USA 84:7413-7417, which is herein incorporated by reference. Similar methods can be used to prepare liposomes from other cationic lipid materials.

[0425] Similarly, anionic and neutral liposomes are readily available, such as from Avanti Polar Lipids (Birmingham, Ala.), or can be easily prepared using readily available materials. Such materials include phosphatidyl choline, cholesterol, phosphatidyl ethanolamine, dioleoylphosphatidyl choline (DOPC), dioloylphosphatidyl glycerol (DOPG), dioleoylphoshatidyl ethanolamine (DOPE), among others. These materials can also be mixed with the DOTMA and DOTAP starting materials in appropriate ratios. Methods for making liposomes using these materials are well known in the art.

[0426] For example, commercially dioleoylphosphatidyl choline (DOPC), dioleoylphosphatidyl glycerol (DOPG), and dioleoylphosphatidyl ethanolamine (DOPE) can be used in various combinations to make conventional liposomes, with or without the addition of cholesterol. Thus, for example, DOPG/DOPC vesicles can be prepared by drying 50 mg each of DOPG and DOPC under a stream of nitrogen gas into a sonication vial. The sample is placed under a vacuum pump overnight and is hydrated the following day with deionized water. The sample is then sonicated for 2 hours in a capped vial, using a Heat Systems model 350 sonicator equipped with an inverted cup (bath type) probe at the maximum setting while the bath is circulated at 15EC. Alternatively, negatively charged vesicles can be prepared without sonication to produce multilamellar vesicles or by extrusion through nucleopore membranes to produce unilamellar vesicles of discrete size. Other methods are known and available to those of skill in the art.

[0427] The liposomes can comprise multilamellar vesicles (MLVs), small unilamellar vesicles (SUVs), or large unilamellar vesicles (LUVs), with SUVs being preferred. The various liposome-nucleic acid complexes are prepared using methods well known in the art. See, e.g., Straubinger et al., Methods of Immunology (1983), 101:512-527, which is herein incorporated by reference. For example, MLVs containing nucleic acid can be prepared by depositing a thin film of phospholipid on the walls of a glass tube and subsequently hydrating with a solution of the material to be encapsulated. SUVs are prepared by extended sonication of MLVs to produce a homogeneous population of unilamellar liposomes. The material to be entrapped is added to a suspension of preformed MLVs and then sonicated. When using liposomes containing cationic lipids, the dried lipid film is resuspended in an appropriate solution such as sterile water or an isotonic buffer solution such as 10 mM Tris/NaCl, sonicated, and then the preformed liposomes are mixed directly with the DNA. The liposome and DNA form a very stable complex due to binding of the positively charged liposomes to the cationic DNA. SUVs find use with small nucleic acid fragments. LUVs are prepared by a number of methods, well known in the art. Commonly used methods include Ca²+ -EDTA chelation (Papahadjopoulos et al., Biochim. Biophys. Acta (1975) 394:483; Wilson et al., Cell 17:77 (1979); ether injection (Deamer, D. and Bangham, A., Biochim. Biophys. Acta 443:629 (1976); Ostro et al., Biochem. Biophys. Res. Commun. 76:836 (1977); Fraley et al., Proc. Natl. Acad. Sci. USA 76:3348 (1979)); detergent dialysis (Enoch, H. and Strittmatter, P., Proc. Natl. Acad. Sci. USA 76:145 (1979)); and reverse-phase evaporation (REV) (Fraley et al., J. Biol. Chem. 255:10431 (1980); Szoka et al., Proc. Natl. Acad. Sci. USA 75:145 (1978); Schaefer-Ridder et al., Science 215:166 (1982)), which are herein incorporated by reference.

[0428] Generally, the ratio of DNA to liposomes will be from about 10:1 to about 1:10. Preferably, the ration will be from about 5:1 to about 1:5. More preferably, the ration will be about 3:1 to about 1:3. Still more preferably, the ratio will be about 1:1.

[0429] U.S. Pat. No. 5,676,954 (which is herein incorporated by reference) reports on the injection of genetic material, complexed with cationic liposomes carriers, into mice. U.S. Pat. Nos. 4,897,355, 4,946,787, 5,049,386, 5,459,127, 5,589,466, 5,693,622, 5,580,859, 5,703,055, and international publication no. WO 94/9469 (which are herein incorporated by reference) provide cationic lipids for use in transfecting DNA into cells and mammals. U.S. Pat. Nos. 5,589,466, 5,693,622, 5,580,859, 5,703,055, and International Publication No. WO 94/9469 provide methods for delivering DNA-cationic lipid complexes to mammals.

[0430] In certain embodiments, cells are engineered, ex vivo or in vivo, using a retroviral particle containing RNA, which comprises a sequence encoding a polypeptide of the present invention. Retroviruses from which the retroviral plasmid vectors may be derived include, but are not limited to, Moloney Murine Leukemia Virus, spleen necrosis virus, Rous sarcoma Virus, Harvey Sarcoma Virus, avian leukosis virus, gibbon ape leukemia virus, human immunodeficiency virus, Myeloproliferative Sarcoma Virus, and mammary tumor virus.

[0431] The retroviral plasmid vector is employed to transduce packaging cell lines to form producer cell lines. Examples of packaging cells which may be transfected include, but are not limited to, the PE501, PA317, R-2, R-AM, PA12, T19-14X, VT-19-17-H2, RCRE, RCRIP, GP+E-86, GP+envAm12, and DAN cell lines as described in Miller, Human Gene Therapy 1:5-14 (1990), which is incorporated herein by reference in its entirety. The vector may transduce the packaging cells through any means known in the art. Such means include, but are not limited to, electroporation, the use of liposomes, and CaPO₄ precipitation. In one alternative, the retroviral plasmid vector may be encapsulated into a liposome, or coupled to a lipid, and then administered to a host.

[0432] The producer cell line generates infectious retroviral vector particles, which include polynucleotide encoding a polypeptide of the present invention. Such retroviral vector particles then may be employed, to transduce eukaryotic cells, either in vitro or in vivo. The transduced eukaryotic cells will express a polypeptide of the present invention.

[0433] In certain other embodiments, cells are engineered, ex vivo or in vivo, with polynucleotide contained in an adenovirus vector. Adenovirus can be manipulated such that it encodes and expresses a polypeptide of the present invention, and at the same time is inactivated in terms of its ability to replicate in a normal lytic viral life cycle. Adenovirus expression is achieved without integration of the viral DNA into the host cell chromosome, thereby alleviating concerns about insertional mutagenesis. Furthermore, adenoviruses have been used as live enteric vaccines for many years with an excellent safety profile (Schwartz, et al., Am. Rev. Respir. Dis.109:233-238 (1974)). Finally, adenovirus mediated gene transfer has been demonstrated in a number of instances including transfer of alpha-1-antitrypsin and CFTR to the lungs of cotton rats (Rosenfeld et al., Science 252:431-434 (1991); Rosenfeld et al., Cell 68:143-155 (1991)). Furthermore, extensive studies to attempt to establish adenovirus as a causative agent in human cancer were uniformly negative (Green et al., Proc. Natl. Acad. Sci. USA 76:6606 (1979)).

[0434] Suitable adenoviral vectors useful in the present invention are described, for example, in Kozarsky and Wilson, Curr. Opin. Genet. Devel. 3:499-503 (1993); Rosenfeld et al., Cell 68:143-155 (1992); Engelhardt et al., Human Genet. Ther. 4:759-769 (1993); Yang et al., Nature Genet. 7:362-369 (1994); Wilson et al., Nature 365:691-692 (1993); and U.S. Pat. No. 5,652,224, which are herein incorporated by reference. For example, the adenovirus vector Ad2 is useful and can be grown in human 293 cells. These cells contain the E1 region of adenovirus and constitutively express E1a and E1b, which complement the defective adenoviruses by providing the products of the genes deleted from the vector. In addition to Ad2, other varieties of adenovirus (e.g., Ad3, Ad5, and Ad7) are also useful in the present invention.

[0435] Preferably, the adenoviruses used in the present invention are replication deficient. Replication deficient adenoviruses require the aid of a helper virus and/or packaging cell line to form infectious particles. The resulting virus is capable of infecting cells and can express a polynucleotide of interest which is operably linked to a promoter, but cannot replicate in most cells. Replication deficient adenoviruses may be deleted in one or more of all or a portion of the following genes: E1a, E1b, E3, E4, E2a, or L1 through L5.

[0436] In certain other embodiments, the cells are engineered, ex vivo or in vivo, using an adeno-associated virus (AAV). AAVs are naturally occurring defective viruses that require helper viruses to produce infectious particles (Muzyczka, N., Curr. Topics in Microbiol. Immunol. 158:97 (1992)). It is also one of the few viruses that may integrate its DNA into non-dividing cells. Vectors containing as little as 300 base pairs of AAV can be packaged and can integrate, but space for exogenous DNA is limited to about 4.5 kb. Methods for producing and using such AAVs are known in the art. See, for example, U.S. Pat. Nos. 5,139,941, 5,173,414, 5,354,678, 5,436,146, 5,474,935, 5,478,745, and 5,589,377.

[0437] For example, an appropriate AAV vector for use in the present invention will include all the sequences necessary for DNA replication, encapsidation, and host-cell integration. The polynucleotide construct is inserted into the AAV vector using standard cloning methods, such as those found in Sambrook et al., Molecular Cloning: A Laboratory Manual, Cold Spring Harbor Press (1989). The recombinant AAV vector is then transfected into packaging cells which are infected with a helper virus, using any standard technique, including lipofection, electroporation, calcium phosphate precipitation, etc. Appropriate helper viruses include adenoviruses, cytomegaloviruses, vaccinia viruses, or herpes viruses. Once the packaging cells are transfected and infected, they will produce infectious AAV viral particles, which contain the polynucleotide construct. These viral particles are then used to transduce eukaryotic cells, either ex vivo or in vivo. The transduced cells will contain the polynucleotide construct integrated into its genome, and will express a polypeptide of the invention.

[0438] Another method of gene therapy involves operably associating heterologous control regions and endogenous liver antigen polynucleotide sequences (e.g., encoding a liver antigen polypeptide of the present invention) via homologous recombination (see, e.g., U.S. Pat. No. 5,641,670, issued Jun. 24, 1997; International Publication No. WO 96/29411, published Sep. 26, 1996; International Publication No. WO 94/12650, published Aug. 4, 1994; Koller et al., Proc. Natl. Acad. Sci. USA 86:8932-8935 (1989); and Zijlstra et al., Nature 342:435-438 (1989), which are herein incorporated by reference. This method involves the activation of a gene which is present in the target cells, but which is not normally expressed in the cells, or is expressed at a lower level than desired.

[0439] Polynucleotide constructs are made, using standard techniques known in the art, which contain the promoter with targeting sequences flanking the promoter. Suitable promoters are described herein. The targeting sequence is sufficiently complementary to an endogenous sequence to permit homologous recombination of the promoter-targeting sequence with the endogenous sequence. The targeting sequence will be sufficiently near the 5′ end of the desired endogenous polynucleotide sequence so the promoter will be operably linked to the endogenous sequence upon homologous recombination.

[0440] The promoter and the targeting sequences can be amplified using PCR. Preferably, the amplified promoter contains distinct restriction enzyme sites on the 5′ and 3′ ends. Preferably, the 3′ end of the first targeting sequence contains the same restriction enzyme site as the 5′ end of the amplified promoter and the 5′ end of the second targeting sequence contains the same restriction site as the 3′ end of the amplified promoter. The amplified promoter and targeting sequences are digested and ligated together.

[0441] The promoter-targeting sequence construct is delivered to the cells, either as naked polynucleotide, or in conjunction with transfection-facilitating agents, such as liposomes, viral sequences, viral particles, whole viruses, lipofection, precipitating agents, etc., described in more detail above. The P promoter-targeting sequence can be delivered by any method, included direct needle injection, intravenous injection, topical administration, catheter infusion, particle accelerators, etc. The methods are described in more detail below.

[0442] The promoter-targeting sequence construct is taken up by cells. Homologous recombination between the construct and the endogenous sequence takes place, such that an endogenous sequence is placed under the control of the promoter. The promoter then drives the expression of the endogenous sequence.

[0443] The polynucleotide encoding a polypeptide of the present invention may contain a secretory signal sequence that facilitates secretion of the protein. Typically, the signal sequence is positioned in the coding region of the polynucleotide to be expressed towards or at the 5′ end of the coding region. The signal sequence may be homologous or heterologous to the liver antigen polynucleotide of interest and may be homologous or heterologous to the cells to be transfected. Additionally, the signal sequence may be chemically synthesized using methods known in the art.

[0444] Any mode of administration of any of the above-described polynucleotides constructs can be used so long as the mode results in the expression of one or more molecules in an amount sufficient to provide a therapeutic effect. This includes direct needle injection, systemic injection, catheter infusion, biolistic injectors, particle accelerators (i.e., “gene guns”), gelfoam sponge depots, other commercially available depot materials, osmotic pumps (e.g., Alza minipumps), oral or suppositorial solid (table or pill) pharmaceutical formulations, and decanting or topical applications during surgery. For example, direct injection of naked calcium phosphate-precipitated plasmid into rat liver and rat spleen or a protein-coated plasmid into the portal vein has resulted in gene expression of the foreign gene in the rat livers (Kaneda et al., Science 243:375 (1989)).

[0445] A preferred method of local administration is by direct injection. Preferably, a recombinant molecule of the present invention complexed with a delivery vehicle is administered by direct injection into or locally within the area of arteries. Administration of a composition locally within the area of arteries refers to injecting the composition centimeters and preferably, millimeters within arteries.

[0446] Another method of local administration is to contact a polynucleotide construct of the present invention in or around a surgical wound. For example, a patient can undergo surgery and the polynucleotide construct can be coated on the surface of tissue inside the wound or the construct can be injected into areas of tissue inside the wound.

[0447] Therapeutic compositions useful in systemic administration, include recombinant molecules of the present invention complexed to a targeted delivery vehicle of the present invention. Suitable delivery vehicles for use with systemic administration comprise liposomes comprising ligands for targeting the vehicle to a particular site. In specific embodiments, suitable delivery vehicles for use with systemic administration comprise liposomes comprising polypeptides of the invention for targeting the vehicle to a particular site.

[0448] Preferred methods of systemic administration, include intravenous injection, aerosol, oral and percutaneous (topical) delivery. Intravenous injections can be performed using methods standard in the art. Aerosol delivery can also be performed using methods standard in the art (see, for example, Stribling et al., Proc. Natl. Acad. Sci. USA 189:11277-11281, 1992, which is incorporated herein by reference). Oral delivery can be performed by complexing a polynucleotide construct of the present invention to a carrier capable of withstanding degradation by digestive enzymes in the gut of an animal. Examples of such carriers, include plastic capsules or tablets, such as those known in the art. Topical delivery can be performed by mixing a polynucleotide construct of the present invention with a lipophilic reagent (e.g., DMSO) that is capable of passing into the skin.

[0449] Determining an effective amount of substance to be delivered can depend upon a number of factors including, for example, the chemical structure and biological activity of the substance, the age and weight of the animal, the precise condition requiring treatment and its severity, and the route of administration. The frequency of treatments depends upon a number of factors, such as the amount of polynucleotide constructs administered per dose, as well as the health and history of the subject. The precise amount, number of doses, and timing of doses will be determined by the attending physician or veterinarian.

[0450] Therapeutic compositions of the present invention can be administered to any animal, preferably to mammals and birds. Preferred mammals include humans, dogs, cats, mice, rats, rabbits sheep, cattle, horses and pigs, with humans being particularly preferred.

### Biological Activities

[0451] Polynucleotides or polypeptides, or agonists or antagonists of the present invention, can be used in assays to test for one or more biological activities. If these polynucleotides or polypeptides, or agonists or antagonists of the present invention, do exhibit activity in a particular assay, it is likely that these molecules may be involved in the diseases associated with the biological activity. Thus, the polynucleotides and polypeptides, and agonists or antagonists could be used to treat, prevent diagnose and/or prognose the associated disease.

[0452] The liver antigen polynucleotides and polypeptides of the invention are predicted to have predominant expression in liver tissues.

[0453] Thus, the liver antigens of the invention may be useful as therapeutic molecules. Each would be useful for diagnosis, detection, treatment and/or prevention of diseases or disorders of the liver, including but not limited to infections (e.g., infections due to viruses, such as, cytomegalovirus, Epstein-Barr, hepatitis A virus, hepatitis B virus, hepatitis non-A, non-B; infections due to fungi; infections due to bacteria; infections due to parasites, such as, Clonorchis sinensis, Echinococcus granulosus, Entamoeba histolytica), inflammations (e.g., cirrhosis, acute hepatitis, granulomatous hepatitis), disorders due to toxin damage (such as, exposure to poisons, drugs (such as, acetaminophen, chlorpromazine), environmental poisons (such as, carbon tetrachloride or vinyl chloride)) (e.g., acute canalicular hepatitis), autoimmune diseases (e.g., Wilson's disease, primary biliary cirrhosis), neoplastic disorders (e.g., adenomas, hemangiomas, hepatocellular carcinoma), and/or as described under “Gastrointestinal Disorders” below.

[0454] In a preferred embodiment, polynucleotides of the invention (e.g., a nucleic acid sequence of SEQ ID NO:X or the complement thereof, or the cDNA sequence contained in Clone ID NO:Z, or fragments or variants thereof) and/or polypeptides of the invention (e.g., an amino acid sequence contained in SEQ ID NO:Y, an amino acid sequence encoded by SEQ ID NO:X, or the complement thereof, an amino acid sequence encoded by the cDNA sequence contained in Clone ID NO:Z and fragments or variants thereof as described herein) are useful for the diagnosis, detection, treatment, and/or prevention of diseases or disorders of the tissues/cells corresponding to the library source disclosed in column 7 of Table 1A expressing the corresponding liver sequence disclosed in the same row of Table 1A. In certain embodiments, a polypeptide of the invention, or polynucleotides, antibodies, agonists, or antagonists corresponding to that polypeptide, may be used to diagnose and/or prognose diseases and/or disorders associated with the tissue(s) in which the polypeptide of the invention is expressed, including one, two, three, four, five, or more tissues disclosed in Table 1A, column 7 (Tissue Distribution Library Code).

[0455] Particularly, the liver antigens may be a useful therapeutic for liver cancer. Treatment, diagnosis, detection, and/or prevention of liver disorders could be carried out using a liver antigen or soluble form of a liver antigen, a liver antigen ligand, gene therapy, or ex vivo applications. Moreover, inhibitors of a liver antigen, either blocking antibodies or mutant forms, could modulate the expression of the liver antigen. These inhibitors may be useful to treat, diagnose, detect, and/or prevent diseases associated with the misregulation of a liver antigen.

[0456] In one embodiment, the invention provides a method for the specific delivery of compositions of the invention to cells (e.g., normal or diseased liver cells) by administering polypeptides of the invention (e.g., liver antigen polypeptides or anti-liver antigen antibodies) that are associated with heterologous polypeptides or nucleic acids. In one example, the invention provides a method for delivering a therapeutic protein into the targeted cell (e.g., an aberrant liver cell or liver cancer cell). In another example, the invention provides a method for delivering a single stranded nucleic acid (e.g., antisense or ribozymes) or double stranded nucleic acid (e.g., DNA that can integrate into the cell's genome or replicate episomally and that can be transcribed) into the targeted cell.

[0457] In another embodiment, the invention provides a method for the specific destruction of cells (e.g., the destruction of aberrant liver cells, including, but not limited to, liver tumor cells) by administering polypeptides of the invention (e.g., liver antigen polypeptides or fragments thereof, or anti-liver antigen antibodies) in association with toxins or cytotoxic prodrugs.

[0458] By “toxin” is meant compounds that bind and activate endogenous cytotoxic effector systems, radioisotopes, holotoxins, modified toxins, catalytic subunits of toxins, cytotoxins (cytotoxic agents), or any molecules or enzymes not normally present in or on the surface of a cell that under defined conditions cause the cell's death. Toxins that may be used according to the methods of the invention include, but are not limited to, radioisotopes known in the art, compounds such as, for example, antibodies (or complement fixing containing portions thereof) that bind an inherent or induced endogenous cytotoxic effector system, thymidine kinase, endonuclease, RNAse, alpha toxin, ricin, abrin, Pseudomonas exotoxin A, diphtheria toxin, saporin, momordin, gelonin, pokeweed antiviral protein, alpha-sarcin and cholera toxin. “Toxin” also includes a cytostatic or cytocidal agent, a therapeutic agent or a radioactive metal ion, e.g., alpha-emitters such as, for example, 213Bi, or other radioisotopes such as, for example, ¹⁰³Pd, ¹³³Xe, 131I, ⁶⁸Ge, ⁵⁷Co, ⁶⁵Zn, ⁸⁵Sr, ³²P, 35S, ⁹⁰Y, ¹⁵³Sm, ¹⁵³Gd, ¹⁶⁹Yb, ⁵¹Cr, ⁵⁴Mn, ⁷⁵Se, ¹¹³Sn, ⁹⁰Yttrium, ¹¹⁷Tin, ¹⁸⁶Rhenium, ¹⁶⁶Holmium, and ¹⁸⁸Rhenium; luminescent labels, such as luminol; and fluorescent labels, such as fluorescein and rhodamine, and biotin.

[0459] Techniques known in the art may be applied to label antibodies of the invention. Such techniques include, but are not limited to, the use of bifunctional conjugating agents (see e.g., U.S. Pat. Nos. 5,756,065; 5,714,631; 5,696,239; 5,652,361; 5,505,931; 5,489,425; 5,435,990; 5,428,139; 5,342,604; 5,274,119; 4,994,560; and 5,808,003; the contents of each of which are hereby incorporated by reference in its entirety). A cytotoxin or cytotoxic agent includes any agent that is detrimental to cells. Examples include paclitaxol, cytochalasin B, gramicidin D, ethidium bromide, emetine, mitomycin, etoposide, tenoposide, vincristine, vinblastine, colchicin, doxorubicin, daunorubicin, dihydroxy anthracin dione, mitoxantrone, mithramycin, actinomycin D, 1-dehydrotestosterone, glucocorticoids, procaine, tetracaine, lidocaine, propranolol, and puromycin and analogs or homologs thereof. Therapeutic agents include, but are not limited to, antimetabolites (e.g., methotrexate, 6-mercaptopurine, 6-thioguanine, cytarabine, 5-fluorouracil decarbazine), alkylating agents (e.g., mechlorethamine, thioepa chlorambucil, melphalan, carmustine (BSNU) and lomustine (CCNU), cyclothosphamide, busulfan, dibromomannitol, streptozotocin, mitomycin C, and cis- dichlorodiamine platinum (II) (DDP) cisplatin), anthracyclines (e.g., daunorubicin (formerly daunomycin) and doxorubicin), antibiotics (e.g., dactinomycin (formerly actinomycin), bleomycin, mithramycin, and anthramycin (AMC)), and anti-mitotic agents (e.g., vincristine and vinblastine).

[0460] By “cytotoxic prodrug” is meant a non-toxic compound that is converted by an enzyme, normally present in the cell, into a cytotoxic compound. Cytotoxic prodrugs that may be used according to the methods of the invention include, but are not limited to, glutamyl derivatives of benzoic acid mustard alkylating agent, phosphate derivatives of etoposide or mitomycin C, cytosine arabinoside, daunorubisin, and phenoxyacetamide derivatives of doxorubicin.

[0461] It will be appreciated that conditions caused by a decrease in the standard or normal level of a liver antigen activity in an individual, particularly disorders of the liver, can be treated by administration of a liver antigen polypeptide (e.g., such as, for example, the complete liver antigen polypeptide, the soluble form of the extracellular domain of a liver antigen polypeptide, or cells expressing the complete protein) or agonist. Thus, the invention also provides a method of treatment of an individual in need of an increased level of liver antigen activity comprising administering to such an individual a pharmaceutical composition comprising an amount of an isolated liver antigen polypeptide of the invention, or agonist thereof (e.g., an agonistic anti-liver antigen antibody), effective to increase the liver antigen activity level in such an individual.

[0462] It will also be appreciated that conditions caused by a increase in the standard or normal level of liver antigen activity in an individual, particularly disorders of the liver, can be treated by administration of liver antigen polypeptides (e.g., such as, for example, the complete liver antigen polypeptide, the soluble form of the extracellular domain of a liver antigen polypeptide, or cells expressing the complete protein) or antagonist (e.g., an antagonistic liver antigen antibody). Thus, the invention also provides a method of treatment of an individual in need of an decreased level of liver antigen activity comprising administering to such an individual a pharmaceutical composition comprising an amount of an isolated liver antigen polypeptide of the invention, or antagonist thereof (e.g., an antagonistic anti-liver antigen antibody), effective to decrease the liver antigen activity level in such an individual.

[0463] More generally, polynucleotides, translation products and antibodies corresponding to this gene may be useful for the diagnosis, prognosis, prevention, and/or treatment of diseases and/or disorders associated with the following systems.

### Gastrointestinal Disorders

[0464] Polynucleotides or polypeptides, or agonists or antagonists of the present invention, may be used to treat, prevent, diagnose, and/or prognose gastrointestinal disorders, including inflammatory diseases and/or conditions, infections, cancers (e.g., intestinal neoplasms (carcinoid tumor of the small intestine, non-Hodgkin's lymphoma of the small intestine, small bowl lymphoma)), and ulcers, such as peptic ulcers.

[0465] Gastrointestinal disorders include dysphagia, odynophagia, inflammation of the esophagus, peptic esophagitis, gastric reflux, submucosal fibrosis and stricturing, Mallory-Weiss lesions, leiomyomas, lipomas, epidermal cancers, adeoncarcinomas, gastric retention disorders, gastroenteritis, gastric atrophy, gastric/stomach cancers, polyps of the stomach, autoimmune disorders such as pernicious anemia, pyloric stenosis, gastritis (bacterial, viral, eosinophilic, stress-induced, chronic erosive, atrophic, plasma cell, and Ménétrier's), and peritoneal diseases (e.g., chyloperioneum, hemoperitoneum, mesenteric cyst, mesenteric lymphadenitis, mesenteric vascular occlusion, panniculitis, neoplasms, peritonitis, pneumoperitoneum, bubphrenic abscess).

[0466] Gastrointestinal disorders also include disorders associated with the small intestine, such as malabsorption syndromes, distension, irritable bowel syndrome, sugar intolerance, celiac disease, duodenal ulcers, duodenitis, tropical sprue, Whipple's disease, intestinal lymphangiectasia, Crohn's disease, appendicitis, obstructions of the ileum, Meckel's diverticulum, multiple diverticula, failure of complete rotation of the small and large intestine, lymphoma, and bacterial and parasitic diseases (such as Traveler's diarrhea, typhoid and paratyphoid, cholera, infection by Roundworms (Ascariasis lumbricoides), Hookworms (Ancvlostoma duodenale), Threadworms (Enterobius vermicularis), Tapeworms (Taenia saginata, Echinococcus granulosus, Diphyllobothrium spp., and T. solium).

[0467] Liver diseases and/or disorders include intrahepatic cholestasis (alagille syndrome, biliary liver cirrhosis), fatty liver (alcoholic fatty liver, reye syndrome), hepatic vein thrombosis, hepatolentricular degeneration, hepatomegaly, hepatopulmonary syndrome, hepatorenal syndrome, portal hypertension (esophageal and gastric varices), liver abscess (amebic liver abscess), liver cirrhosis (alcoholic, biliary and experimental), alcoholic liver diseases (fatty liver, hepatitis, cirrhosis), parasitic (hepatic echinococcosis, fascioliasis, amebic liver abscess), jaundice (hemolytic, hepatocellular, and cholestatic), cholestasis, portal hypertension, liver enlargement, ascites, hepatitis (alcoholic hepatitis, animal hepatitis, chronic hepatitis (autoimmune, hepatitis B, hepatitis C, hepatitis D, drug induced), toxic hepatitis, viral human hepatitis (hepatitis A, hepatitis B, hepatitis C, hepatitis D, hepatitis E), Wilson's disease, granulomatous hepatitis, secondary biliary cirrhosis, hepatic encephalopathy, portal hypertension, varices, hepatic encephalopathy, primary biliary cirrhosis, primary sclerosing cholangitis, hepatocellular adenoma, hemangiomas, bile stones, liver failure (hepatic encephalopathy, acute liver failure), and liver neoplasms (angiomyolipoma, calcified liver metastases, cystic liver metastases, epithelial tumors, fibrolamellar hepatocarcinoma, focal nodular hyperplasia, hepatic adenoma, hepatobiliary cystadenoma, hepatoblastoma, hepatocellular carcinoma, hepatoma, liver cancer, liver hemangioendothelioma, mesenchymal hamartoma, mesenchymal tumors of liver, nodular regenerative hyperplasia, benign liver tumors (Hepatic cysts [Simple cysts, Polycystic liver disease, Hepatobiliary cystadenoma, Choledochal cyst], Mesenchymal tumors [Mesenchymal hamartoma, Infantile hemangioendothelioma, Hemangioma, Peliosis hepatis, Lipomas, Inflammatory pseudotumor, Miscellaneous], Epithelial tumors [Bile duct epithelium (Bile duct hamartoma, Bile duct adenoma), Hepatocyte (Adenoma, Focal nodular hyperplasia, Nodular regenerative hyperplasia)], malignant liver tumors [hepatocellular, hepatoblastoma, hepatocellular carcinoma, cholangiocellular, cholangiocarcinoma, cystadenocarcinoma, tumors of blood vessels, angiosarcoma, Karposi's sarcoma, hemangioendothelioma, other tumors, embryonal sarcoma, fibrosarcoma, leiomyosarcoma, rhabdomyosarcoma, carcinosarcoma, teratoma, carcinoid, squamous carcinoma, primary lymphoma]), peliosis hepatis, erythrohepatic porphyria, hepatic porphyria (acute intermittent porphyria, porphyria cutanea tarda), Zellweger syndrome).

[0468] Pancreatic diseases and/or disorders include acute pancreatitis, chronic pancreatitis (acute necrotizing pancreatitis, alcoholic pancreatitis), neoplasms (adenocarcinoma of the pancreas, cystadenocarcinoma, insulinoma, gastrinoma, and glucagonoma, cystic neoplasms, islet-cell tumors, pancreoblastoma), and other pancreatic diseases (e.g., cystic fibrosis, cyst (pancreatic pseudocyst, pancreatic fistula, insufficiency)).

[0469] Gallbladder diseases include gallstones (cholelithiasis and choledocholithiasis), postcholecystectomy syndrome, diverticulosis of the gallbladder, acute cholecystitis, chronic cholecystitis, bile duct tumors, and mucocele.

[0470] Diseases and/or disorders of the large intestine include antibiotic-associated colitis, diverticulitis, ulcerative colitis, acquired megacolon, abscesses, fungal and bacterial infections, anorectal disorders (e.g., fissures, hemorrhoids), colonic diseases (colitis, colonic neoplasms [colon cancer, adenomatous colon polyps (e.g., villous adenoma), colon carcinoma, colorectal cancer], colonic diverticulitis, colonic diverticulosis, megacolon [Hirschsprung disease, toxic megacolon]; sigmoid diseases [proctocolitis, sigmoin neoplasms]), constipation, Crohn's disease, diarrhea (infantile diarrhea, dysentery), duodenal diseases (duodenal neoplasms, duodenal obstruction, duodenal ulcer, duodenitis), enteritis (enterocolitis), HIV enteropathy, ileal diseases (ileal neoplasms, ileitis), immunoproliferative small intestinal disease, inflammatory bowel disease (ulcerative colitis, Crohn's disease), intestinal atresia, parasitic diseases (anisakiasis, balantidiasis, blastocystis infections, cryptosporidiosis, dientamoebiasis, amebic dysentery, giardiasis), intestinal fistula (rectal fistula), intestinal neoplasms (cecal neoplasms, colonic neoplasms, duodenal neoplasms, ileal neoplasms, intestinal polyps, jejunal neoplasms, rectal neoplasms), intestinal obstruction (afferent loop syndrome, duodenal obstruction, impacted feces, intestinal pseudo-obstruction [cecal volvulus], intussusception), intestinal perforation, intestinal polyps (colonic polyps, gardner syndrome, peutz-jeghers syndrome), jejunal diseases (jejunal neoplasms), malabsorption syndromes (blind loop syndrome, celiac disease, lactose intolerance, short bowl syndrome, tropical sprue, whipple's disease), mesenteric vascular occlusion, pneumatosis cystoides intestinalis, protein-losing enteropathies (intestinal lymphagiectasis), rectal diseases (anus diseases, fecal incontinence, hemorrhoids, proctitis, rectal fistula, rectal prolapse, rectocele), peptic ulcer (duodenal ulcer, peptic esophagitis, hemorrhage, perforation, stomach ulcer, Zollinger-Ellison syndrome), postgastrectomy syndromes (dumping syndrome), stomach diseases (e.g., achlorhydria, duodenogastric reflux (bile reflux), gastric antral vascular ectasia, gastric fistula, gastric outlet obstruction, gastritis (atrophic or hypertrophic), gastroparesis, stomach dilatation, stomach diverticulum, stomach neoplasms (gastric cancer, gastric polyps, gastric adenocarcinoma, hyperplastic gastric polyp), stomach rupture, stomach ulcer, stomach volvulus), tuberculosis, visceroptosis, vomiting (e.g., hematemesis, hyperemesis gravidarum, postoperative nausea and vomiting) and hemorrhagic colitis.

[0471] Further diseases and/or disorders of the gastrointestinal system include biliary tract diseases, such as, gastroschisis, fistula (e.g., biliary fistula, esophageal fistula, gastric fistula, intestinal fistula, pancreatic fistula), neoplasms (e.g., biliary tract neoplasms, esophageal neoplasms, such as adenocarcinoma of the esophagus, esophageal squamous cell carcinoma, gastrointestinal neoplasms, pancreatic neoplasms, such as adenocarcinoma of the pancreas, mucinous cystic neoplasm of the pancreas, pancreatic cystic neoplasms, pancreatoblastoma, and peritoneal neoplasms), esophageal disease (e.g., bullous diseases, candidiasis, glycogenic acanthosis, ulceration, barrett esophagus varices, atresia, cyst, diverticulum (e.g., Zenker's diverticulum), fistula (e.g., tracheoesophageal fistula), motility disorders (e.g., CREST syndrome, deglutition disorders, achalasia, spasm, gastroesophageal reflux), neoplasms, perforation (e.g., Boerhaave syndrome, Mallory-Weiss syndrome), stenosis, esophagitis, diaphragmatic hernia (e.g., hiatal hernia); gastrointestinal diseases, such as, gastroenteritis (e.g., cholera morbus, norwalk virus infection), hemorrhage (e.g., hematemesis, melena, peptic ulcer hemorrhage), stomach neoplasms (gastric cancer, gastric polyps, gastric adenocarcinoma, stomach cancer)), hernia (e.g., congenital diaphragmatic hernia, femoral hernia, inguinal hernia, obturator hernia, umbilical hernia, ventral hernia), and intestinal diseases (e.g., cecal diseases (appendicitis, cecal neoplasms)).

### Immune Activity

[0472] Polynucleotides, polypeptides, antibodies, and/or agonists or antagonists of the present invention may be useful in treating, preventing, diagnosing and/or prognosing diseases, disorders, and/or conditions of the immune system, by, for example, activating or inhibiting the proliferation, differentiation, or mobilization (chemotaxis) of immune cells. Immune cells develop through a process called hematopoiesis, producing myeloid (platelets, red blood cells, neutrophils, and macrophages) and lymphoid (B and T lymphocytes) cells from pluripotent stem cells. The etiology of these immune diseases, disorders, and/or conditions may be genetic, somatic, such as cancer and some autoimmune diseases, acquired (e.g., by chemotherapy or toxins), or infectious. Moreover, polynucleotides, polypeptides, antibodies, and/or agonists or antagonists of the present invention can be used as a marker or detector of a particular immune system disease or disorder.

[0473] In another embodiment, a polypeptide of the invention, or polynucleotides, antibodies, agonists, or antagonists corresponding to that polypeptide, may be used to treat diseases and disorders of the immune system and/or to inhibit or enhance an immune response generated by cells associated with the tissue(s) in which the polypeptide of the invention is expressed, including one, two, three, four, five, or more tissues disclosed in Table 1A, column 7 (Tissue Distribution Library Code).

[0474] Polynucleotides, polypeptides, antibodies, and/or agonists or antagonists of the present invention may be useful in treating, preventing, diagnosing, and/or prognosing immunodeficiencies, including both congenital and acquired immunodeficiencies. Examples of B cell immunodeficiencies in which immunoglobulin levels B cell function and/or B cell numbers are decreased include: X-linked agammaglobulinemia (Bruton's disease), X-linked infantile agammaglobulinemia, X-linked immunodeficiency with hyper IgM, non X-linked immunodeficiency with hyper IgM, X-linked lymphoproliferative syndrome (XLP), agammaglobulinemia including congenital and acquired agammaglobulinemia, adult onset agammaglobulinemia, late-onset agammaglobulinemia, dysgammaglobulinemia, hypogammaglobulinemia, unspecified hypogammaglobulinemia, recessive agammaglobulinemia (Swiss type), Selective IgM deficiency, selective IgA deficiency, selective IgG subclass deficiencies, IgG subclass deficiency (with or without IgA deficiency), Ig deficiency with increased IgM, IgG and IgA deficiency with increased IgM, antibody deficiency with normal or elevated Igs, Ig heavy chain deletions, kappa chain deficiency, B cell lymphoproliferative disorder (BLPD), common variable immunodeficiency (CVID), common variable immunodeficiency (CVI) (acquired), and transient hypogammaglobulinemia of infancy.

[0475] In specific embodiments, ataxia-telangiectasia or conditions associated with ataxia-telangiectasia are treated, prevented, diagnosed, and/or prognosing using the polypeptides or polynucleotides of the invention, and/or agonists or antagonists thereof.

[0476] Examples of congenital immunodeficiencies in which T cell and/or B cell function and/or number is decreased include, but are not limited to: DiGeorge anomaly, severe combined immunodeficiencies (SCID) (including, but not limited to, X-link SCID, autosomal recessive SCID, adenosine deaminase deficiency, purine nucleoside phosphorylase (PNP) deficiency, Class II MHC deficiency (Bare lymphocyte syndrome), Wiskott-Aldrich syndrome, and ataxia telangiectasia), thymic hypolasia, third and fourth pharyngeal pouch syndrome, 22q11.2 deletion, chronic nucocutaneous candidiasis, natural killer cell deficiency (NK), idiopathic CD4+ T-lymphocytopenia, immunodeficiency with predominant T cell defect (unspecified), and unspecified immunodeficiency of cell mediated immunity.

[0477] In specific embodiments, DiGeorge anomaly or conditions associated with DiGeorge anomaly are treated, prevented, diagnosed, and/or prognosed using polypeptides or polynucleotides of the invention, or antagonists or agonists thereof.

[0478] Other immunodeficiencies that may be treated, prevented, diagnosed, and/or prognosed using polypeptides or polynucleotides of the invention, and/or agonists or antagonists thereof, include, but are not limited to, chronic granulomatous disease, Chédiak-Higashi syndrome, myeloperoxidase deficiency, leukocyte glucose-6-phosphate dehydrogenase deficiency, X-linked lymphoproliferative syndrome (XLP), leukocyte adhesion deficiency, complement component deficiencies (including C1, C2, C3, C4, C5, C6, C7, C8 and/or C9 deficiencies), reticular dysgenesis, thymic alymphoplasia-aplasia, immunodeficiency with thymoma, severe congenital leukopenia, dysplasia with immunodeficiency, neonatal neutropenia, short limbed dwarfism, and Nezelof syndrome-combined immunodeficiency with Igs.

[0479] In a preferred embodiment, the immunodeficiencies and/or conditions associated with the immunodeficiencies recited above are treated, prevented, diagnosed and/or prognosed using polynucleotides, polypeptides, antibodies, and/or agonsts or antagonists of the present invention.

[0480] In a preferred embodiment polynucleotides, polypeptides, antibodies, and/or agonists or antagonists of the present invention could be used as an agent to boost immunoresponsiveness among immunodeficient individuals. In specific embodiments, polynucleotides, polypeptides, antibodies, and/or agonists or antagonists of the present invention could be used as an agent to boost immunoresponsiveness among B cell and/or T cell immunodeficient individuals.

[0481] The polynucleotides, polypeptides, antibodies, and/or agonists or antagonists of the present invention may be useful in treating, preventing, diagnosing and/or prognosing autoimmune disorders. Many autoimmune disorders result from inappropriate recognition of self as foreign material by immune cells. This inappropriate recognition results in an immune response leading to the destruction of the host tissue. Therefore, the administration of polynucleotides and polypeptides of the invention that can inhibit an immune response, particularly the proliferation, differentiation, or chemotaxis of T-cells, may be an effective therapy in preventing autoimmune disorders.

[0482] Autoimmune diseases or disorders that may be treated, prevented, diagnosed and/or prognosed by polynucleotides, polypeptides, antibodies, and/or agonists or antagonists of the present invention include, but are not limited to, one or more of the following: systemic lupus erythematosus, rheumatoid arthritis, ankylosing spondylitis, multiple sclerosis, autoimmune thyroiditis, Hashimoto's thyroiditis, autoimmune hemolytic anemia, hemolytic anemia, thrombocytopenia, autoimmune thrombocytopenia purpura, autoimmune neonatal thrombocytopenia, idiopathic thrombocytopenia purpura, purpura (e.g., Henloch-Scoenlein purpura), autoimmunocytopenia, Goodpasture's syndrome, Pemphigus vulgaris, myasthenia gravis, Grave's disease (hyperthyroidism), and insulin-resistant diabetes mellitus.

[0483] Additional disorders that are likely to have an autoimmune component that may be treated, prevented, and/or diagnosed with the compositions of the invention include, but are not limited to, type 11 collagen-induced arthritis, antiphospholipid syndrome, dermatitis, allergic encephalomyelitis, myocarditis, relapsing polychondritis, rheumatic heart disease, neuritis, uveitis ophthalmia, polyendocrinopathies, Reiter's Disease, Stiff-Man Syndrome, autoimmune pulmonary inflammation, autism, Guillain-Barre Syndrome, insulin dependent diabetes mellitus, and autoimmune inflammatory eye disorders.

[0484] Additional disorders that are likely to have an autoimmune component that may be treated, prevented, diagnosed and/or prognosed with the compositions of the invention include, but are not limited to, scleroderma with anti-collagen antibodies (often characterized, e.g., by nucleolar and other nuclear antibodies), mixed connective tissue disease (often characterized, e.g., by antibodies to extractable nuclear antigens (e.g., ribonucleoprotein)), polymyositis (often characterized, e.g., by nonhistone ANA), pernicious anemia (often characterized, e.g., by antiparietal cell, microsomes, and intrinsic factor antibodies), idiopathic Addison's disease (often characterized, e.g., by humoral and cell-mediated adrenal cytotoxicity, infertility (often characterized, e.g., by antispermatozoal antibodies), glomerulonephritis (often characterized, e.g., by glomerular basement membrane antibodies or immune complexes), bullous pemphigoid (often characterized, e.g., by IgG and complement in basement membrane), Sjogren's syndrome (often characterized, e.g., by multiple tissue antibodies, and/or a specific nonhistone ANA (SS-B)), diabetes mellitus (often characterized, e.g., by cell-mediated and humoral islet cell antibodies), and adrenergic drug resistance (including adrenergic drug resistance with asthma or cystic fibrosis) (often characterized, e.g., by beta-adrenergic receptor antibodies).

[0485] Additional disorders that may have an autoimmune component that may be treated, prevented, diagnosed and/or prognosed with the compositions of the invention include, but are not limited to, chronic active hepatitis (often characterized, e.g., by smooth muscle antibodies), primary biliary cirrhosis (often characterized, e.g., by mitochondria antibodies), other endocrine gland failure (often characterized, e.g., by specific tissue antibodies in some cases), vitiligo (often characterized, e.g., by melanocyte antibodies), vasculitis (often characterized, e.g., by Ig and complement in vessel walls and/or low serum complement), post-M1 (often characterized, e.g., by myocardial antibodies), cardiotomy syndrome (often characterized, e.g., by myocardial antibodies), urticaria (often characterized, e.g., by IgG and IgM antibodies to IgE), atopic dermatitis (often characterized, e.g., by IgG and IgM antibodies to IgE), asthma (often characterized, e.g., by IgG and IgM antibodies to IgE), and many other inflammatory, granulomatous, degenerative, and atrophic disorders.

[0486] In a preferred embodiment, the autoimmune diseases and disorders and/or conditions associated with the diseases and disorders recited above are treated, prevented, diagnosed and/or prognosed using for example, antagonists or agonists, polypeptides or polynucleotides, or antibodies of the present invention. In a specific preferred embodiment, rheumatoid arthritis is treated, prevented, and/or diagnosed using polynucleotides, polypeptides, antibodies, and/or agonists or antagonists of the present invention.

[0487] In another specific preferred embodiment, systemic lupus erythematosus is treated, prevented, and/or diagnosed using polynucleotides, polypeptides, antibodies, and/or agonists or antagonists of the present invention. In another specific preferred embodiment, idiopathic thrombocytopenia purpura is treated, prevented, and/or diagnosed using polynucleotides, polypeptides, antibodies, and/or agonists or antagonists of the present invention.

[0488] In another specific preferred embodiment IgA nephropathy is treated, prevented, and/or diagnosed using polynucleotides, polypeptides, antibodies, and/or agonists or antagonists of the present invention.

[0489] In a preferred embodiment, the autoimmune diseases and disorders and/or conditions associated with the diseases and disorders recited above are treated, prevented, diagnosed and/or prognosed using polynucleotides, polypeptides, antibodies, and/or agonists or antagonists of the present invention.

[0490] In preferred embodiments, polypeptides, antibodies, polynucleotides and/or agonists or antagonists of the present invention are used as a immunosuppressive agent(s).

[0491] Polynucleotides, polypeptides, antibodies, and/or agonists or antagonists of the present invention may be useful in treating, preventing, prognosing, and/or diagnosing diseases, disorders, and/or conditions of hematopoietic cells. Polynucleotides, polypeptides, antibodies, and/or agonists or antagonists of the present invention could be used to increase differentiation and proliferation of hematopoietic cells, including the pluripotent stem cells, in an effort to treat or prevent those diseases, disorders, and/or conditions associated with a decrease in certain (or many) types hematopoietic cells, including but not limited to, leukopenia, neutropenia, anemia, and thrombocytopenia. Alternatively, Polynucleotides, polypeptides, antibodies, and/or agonists or antagonists of the present invention could be used to increase differentiation and proliferation of hematopoletic cells, including the pluripotent stem cells, in an effort to treat or prevent those diseases, disorders, and/or conditions associated with an increase in certain (or many) types of hematopoietic cells, including but not limited to, histiocytosis.

[0492] Allergic reactions and conditions, such as asthma (particularly allergic asthma) or other respiratory problems, may also be treated, prevented, diagnosed and/or prognosed using polypeptides, antibodies, or polynucleotides of the invention, and/or agonists or antagonists thereof. Moreover, these molecules can be used to treat, prevent, prognoses and/or diagnose anaphylaxis, hypersensitivity to an antigenic molecule, or blood group incompatibility.

[0493] Additionally, polypeptides or polynucleotides of the invention, and/or agonists or antagonists thereof, may be used to treat, prevent, diagnose and/or prognose IgE-mediated allergic reactions. Such allergic reactions include, but are not limited to, asthma, rhinitis, and eczema. In specific embodiments, polynucleotides, polypeptides, antibodies, and/or agonists or antagonists of the present invention may be used to modulate IgE concentrations in vitro or in vivo.

[0494] Moreover, polynucleotides, polypeptides, antibodies, and/or agonists or antagonists of the present invention have uses in the diagnosis, prognosis, prevention, and/or treatment of inflammatory conditions. For example, since polypeptides, antibodies, or polynucleotides of the invention, and/or agonists or antagonists of the invention may inhibit the activation, proliferation and/or differentiation of cells involved in an inflammatory response, these molecules can be used to prevent and/or treat chronic and acute inflammatory conditions. Such inflammatory conditions include, but are not limited to, for example, inflammation associated with infection (e.g., septic shock, sepsis, or systemic inflammatory response syndrome), ischemia-reperfusion injury, endotoxin lethality, complement-mediated hyperacute rejection, nephritis, cytokine or chemokine induced lung injury, inflammatory bowel disease, Crohn's disease, over production of cytokines (e.g., TNF or IL-1.), respiratory disorders (e.g., asthma and allergy); gastrointestinal disorders (e.g., inflammatory bowel disease); cancers (e.g., gastric, ovarian, lung, bladder, liver, and breast); CNS disorders (e.g., multiple sclerosis; ischemic brain injury and/or stroke, traumatic brain injury, neurodegenerative disorders (e.g., Parkinson's disease and Alzheimer's disease); AIDS-related dementia; and prion disease); cardiovascular disorders (e.g., atherosclerosis, myocarditis, cardiovascular disease, and cardiopulmonary bypass complications); as well as many additional diseases, conditions, and disorders that are characterized by inflammation (e.g., hepatitis, rheumatoid arthritis, gout, trauma, pancreatitis, sarcoidosis, dermatitis, renal ischemia-reperfusion injury, Grave's disease, systemic lupus erythematosus, diabetes mellitus, and allogenic transplant rejection).

[0495] Because inflammation is a fundamental defense mechanism, inflammatory disorders can effect virtually any tissue of the body. Accordingly, polynucleotides, polypeptides, and antibodies of the invention, as well as agonists or antagonists thereof, have uses in the treatment of tissue-specific inflammatory disorders, including, but not limited to, adrenalitis, alveolitis, angiocholecystitis, appendicitis, balanitis, blepharitis, bronchitis, bursitis, carditis, cellulitis, cervicitis, cholecystitis, chorditis, cochlitis, colitis, conjunctivitis, cystitis, dermatitis, diverticulitis, encephalitis, endocarditis, esophagitis, eustachitis, fibrositis, folliculitis, gastritis, gastroenteritis, gingivitis, glossitis, hepatosplenitis, keratitis, labyrinthitis, laryngitis, lymphangitis, mastitis, media otitis, meningitis, metritis, mucitis, myocarditis, myosititis, myringitis, nephritis, neuritis, orchitis, osteochondritis, otitis, pericarditis, peritendonitis, peritonitis, pharyngitis, phlebitis, poliomyelitis, prostatitis, pulpitis, retinitis, rhinitis, salpingitis, scleritis, sclerochoroiditis, scrotitis, sinusitis, spondylitis, steatitis, stomatitis, synovitis, syringitis, tendonitis, tonsillitis, urethritis, and vaginitis.

[0496] In specific embodiments, polypeptides, antibodies, or polynucleotides of the invention, and/or agonists or antagonists thereof, are useful to diagnose, prognose, prevent, and/or treat organ transplant rejections and graft-versus-host disease. Organ rejection occurs by host immune cell destruction of the transplanted tissue through an immune response. Similarly, an immune response is also involved in GVHD, but, in this case, the foreign transplanted immune cells destroy the host tissues. Polypeptides, antibodies, or polynucleotides of the invention, and/or agonists or antagonists thereof, that inhibit an immune response, particularly the activation, proliferation, differentiation, or chemotaxis of T-cells, may be an effective therapy in preventing organ rejection or GVHD. In specific embodiments, polypeptides, antibodies, or polynucleotides of the invention, and/or agonists or antagonists thereof, that inhibit an immune response, particularly the activation, proliferation, differentiation, or chemotaxis of T-cells, may be an effective therapy in preventing experimental allergic and hyperacute xenograft rejection.

[0497] In other embodiments, polypeptides, antibodies, or polynucleotides of the invention, and/or agonists or antagonists thereof, are useful to diagnose, prognose, prevent, and/or treat immune complex diseases, including, but not limited to, serum sickness, post streptococcal glomerulonephritis, polyarteritis nodosa, and immune complex-induced vasculitis.

[0498] Polypeptides, antibodies, polynucleotides and/or agonists or antagonists of the invention can be used to treat, detect, and/or prevent infectious agents. For example, by increasing the immune response, particularly increasing the proliferation activation and/or differentiation of B and/or T cells, infectious diseases may be treated, detected, and/or prevented. The immune response may be increased by either enhancing an existing immune response, or by initiating a new immune response. Alternatively, polynucleotides, polypeptides, antibodies, and/or agonists or antagonists of the present invention may also directly inhibit the infectious agent (refer to section of application listing infectious agents, etc), without necessarily eliciting an immune response.

[0499] In another embodiment, polypeptides, antibodies, polynucleotides and/or agonists or antagonists of the present invention are used as a vaccine adjuvant that enhances immune responsiveness to an antigen. In a specific embodiment, polypeptides, antibodies, polynucleotides and/or agonists or antagonists of the present invention are used as an adjuvant to enhance tumor-specific immune responses.

[0500] In another specific embodiment, polypeptides, antibodies, polynucleotides and/or agonists or antagonists of the present invention are used as an adjuvant to enhance anti-viral immune responses. Anti-viral immune responses that may be enhanced using the compositions of the invention as an adjuvant, include virus and virus associated diseases or symptoms described herein or otherwise known in the art. In specific embodiments, the compositions of the invention are used as an adjuvant to enhance an immune response to a virus, disease, or symptom selected from the group consisting of: AIDS, meningitis, Dengue, EBV, and hepatitis (e.g., hepatitis B). In another specific embodiment, the compositions of the invention are used as an adjuvant to enhance an immune response to a virus, disease, or symptom selected from the group consisting of: HIV/AIDS, respiratory syncytial virus, Dengue, rotavirus, Japanese B encephalitis, influenza A and B, parainfluenza, measles, cytomegalovirus, rabies, Junin, Chikungunya, Rift Valley Fever, herpes simplex, and yellow fever.

[0501] In another specific embodiment, polypeptides, antibodies, polynucleotides and/or agonists or antagonists of the present invention are used as an adjuvant to enhance anti-bacterial or anti-fungal immune responses. Anti-bacterial or anti-fungal immune responses that may be enhanced using the compositions of the invention as an adjuvant, include bacteria or fungus and bacteria or fungus associated diseases or symptoms described herein or otherwise known in the art. In specific embodiments, the compositions of the invention are used as an adjuvant to enhance an immune response to a bacteria or fungus, disease, or symptom selected from the group consisting of: tetanus, Diphtheria, botulism, and meningitis type B.

[0502] In another specific embodiment, the compositions of the invention are used as an adjuvant to enhance an immune response to a bacteria or fungus, disease, or symptom selected from the group consisting of: Vibrio cholerae, Mycobacterium leprae, Salmonella typhi, Salmonella paratyphi, Meisseria men ingitidis, Streptococcus pneumoniae, Group B streptococcus, Shigella spp., Enterotoxigenic Escherichia coli, Enterohemorrhagic E. coli, and Borrelia burgdorferi.

[0503] In another specific embodiment, polypeptides, antibodies, polynucleotides and/or agonists or antagonists of the present invention are used as an adjuvant to enhance anti-parasitic immune responses. Anti-parasitic immune responses that may be enhanced using the compositions of the invention as an adjuvant, include parasite and parasite associated diseases or symptoms described herein or otherwise known in the art. In specific embodiments, the compositions of the invention are used as an adjuvant to enhance an immune response to a parasite. In another specific embodiment, the compositions of the invention are used as an adjuvant to enhance an immune response to Plasmodium (malaria) or Leishmania.

[0504] In another specific embodiment, polypeptides, antibodies, polynucleotides and/or agonists or antagonists of the present invention may also be employed to treat infectious diseases including silicosis, sarcoidosis, and idiopathic pulmonary fibrosis; for example, by preventing the recruitment and activation of mononuclear phagocytes.

[0505] In another specific embodiment, polypeptides, antibodies, polynucleotides and/or agonists or antagonists of the present invention are used as an antigen for the generation of antibodies to inhibit or enhance immune mediated responses against polypeptides of the invention.

[0506] In one embodiment, polypeptides, antibodies, polynucleotides and/or agonists or antagonists of the present invention are administered to an animal (e.g., mouse, rat, rabbit, hamster, guinea pig, pigs, micro-pig, chicken, camel, goat, horse, cow, sheep, dog, cat, non-human primate, and human, most preferably human) to boost the immune system to produce increased quantities of one or more antibodies (e.g., IgG, IgA, IgM, and IgE), to induce higher affinity antibody production and immunoglobulin class switching (e.g., IgG, IgA, IgM, and IgE), and/or to increase an immune response.

[0507] In another specific embodiment, polypeptides, antibodies, polynucleotides and/or agonists or antagonists of the present invention are used as a stimulator of B cell responsiveness to pathogens.

[0508] In another specific embodiment, polypeptides, antibodies, polynucleotides and/or agonists or antagonists of the present invention are used as an activator of T cells.

[0509] In another specific embodiment, polypeptides, antibodies, polynucleotides and/or agonists or antagonists of the present invention are used as an agent that elevates the immune status of an individual prior to their receipt of immunosuppressive therapies.

[0510] In another specific embodiment, polypeptides, antibodies, polynucleotides and/or agonists or antagonists of the present invention are used as an agent to induce higher affinity antibodies.

[0511] In another specific embodiment, polypeptides, antibodies, polynucleotides and/or agonists or antagonists of the present invention are used as an agent to increase serum immunoglobulin concentrations.

[0512] In another specific embodiment, polypeptides, antibodies, polynucleotides and/or agonists or antagonists of the present invention are used as an agent to accelerate recovery of immunocompromised individuals.

[0513] In another specific embodiment, polypeptides, antibodies, polynucleotides and/or agonists or antagonists of the present invention are used as an agent to boost immunoresponsiveness among aged populations and/or neonates.

[0514] In another specific embodiment, polypeptides, antibodies, polynucleotides and/or agonists or antagonists of the present invention are used as an immune system enhancer prior to, during, or after bone marrow transplant and/or other transplants (e.g., allogeneic or xenogeneic organ transplantation). With respect to transplantation, compositions of the invention may be administered prior to, concomitant with, and/or after transplantation. In a specific embodiment, compositions of the invention are administered after transplantation, prior to the beginning of recovery of T-cell populations. In another specific embodiment, compositions of the invention are first administered after transplantation after the beginning of recovery of T cell populations, but prior to full recovery of B cell populations.

[0515] In another specific embodiment, polypeptides, antibodies, polynucleotides and/or agonists or antagonists of the present invention are used as an agent to boost immunoresponsiveness among individuals having an acquired loss of B cell function. Conditions resulting in an acquired loss of B cell function that may be ameliorated or treated by administering the polypeptides, antibodies, polynucleotides and/or agonists or antagonists thereof, include, but are not limited to, HIV Infection, AIDS, bone marrow transplant, and B cell chronic lymphocytic leukemia (CLL).

[0516] In another specific embodiment, polypeptides, antibodies, polynucleotides and/or agonists or antagonists of the present invention are used as an agent to boost immunoresponsiveness among individuals having a temporary immune deficiency. Conditions resulting in a temporary immune deficiency that may be ameliorated or treated by administering the polypeptides, antibodies, polynucleotides and/or agonists or antagonists thereof, include, but are not limited to, recovery from viral infections (e.g. influenza), conditions associated with malnutrition, recovery from infectious monoucleosis, or conditions associated with stress, recovery from measles, recovery from blood transfusion, and recovery from surgery.

[0517] In another specific embodiment, polypeptides, antibodies, polynucleotides and/or agonists or antagonists of the present invention are used as a regulator of antigen presentation by monocytes, dendritic cells, and/or B-cells. In one embodiment, polynucleotides, polypeptides, antibodies, and/or agonists or antagonists of the present invention enhance antigen presentation or antagonizes antigen presentation in vitro or in vivo. Moreover, in related embodiments, said enhancement or antagonism of antigen presentation may be useful as an anti-tumor treatment or to modulate the immune system.

[0518] In another specific embodiment, polypeptides, antibodies, polynucleotides and/or agonists or antagonists of the present invention are used as an agent to direct an individual's immune system towards development of a humoral response (i.e. TH2) as opposed to a TH1 cellular response.

[0519] In another specific embodiment, polypeptides, antibodies, polynucleotides and/or agonists or antagonists of the present invention are used as a means to induce tumer proliferation and thus make it more susceptible to anti-neoplastic agents. For example, multiple myeloma is a slowly dividing disease and is thus refractory to virtually all anti-neoplastic regimens. If these cells were forced to proliferate more rapidly their susceptibility profile would likely change.

[0520] In another specific embodiment, polypeptides, antibodies, polynucleotides and/or agonists or antagonists of the present invention are used as a stimulator of B cell production in pathologies such as AIDS, chronic lymphocyte disorder and/or Common Variable Immunodificiency.

[0521] In another specific embodiment, polypeptides, antibodies, polynucleotides and/or agonists or antagonists of the present invention are used as a therapy for generation and/or regeneration of lymphoid tissues following surgery, trauma or genetic defect. In another specific embodiment, polypeptides, antibodies, polynucleotides and/or agonists or antagonists of the present invention are used in the pretreatment of bone marrow samples prior to transplant.

[0522] In another specific embodiment, polypeptides, antibodies, polynucleotides and/or agonists or antagonists of the present invention are used as a gene-based therapy for genetically inherited disorders resulting in immuno-incompetence/immunodeficiency such as observed among SCID patients.

[0523] In another specific embodiment, polypeptides, antibodies, polynucleotides and/or agonists or antagonists of the present invention are used as a means of activating monocytes/macrophages to defend against parasitic diseases that effect monocytes such as Leishmania.

[0524] In another specific embodiment, polypeptides, antibodies, polynucleotides and/or agonists or antagonists of the present invention are used as a means of regulating secreted cytokines that are elicited by polypeptides of the invention.

[0525] In another embodiment, polypeptides, antibodies, polynucleotides and/or agonists or antagonists of the present invention are used in one or more of the applications described herein, as they may apply to veterinary medicine.

[0526] In another specific embodiment, polypeptides, antibodies, polynucleotides and/or agonists or antagonists of the present invention are used as a means of blocking various aspects of immune responses to foreign agents or self. Examples of diseases or conditions in which blocking of certain aspects of immune responses may be desired include autoimmune disorders such as lupus, and arthritis, as well as immunoresponsiveness to skin allergies, inflammation, bowel disease, injury and diseases/disorders associated with pathogens.

[0527] In another specific embodiment, polypeptides, antibodies, polynucleotides and/or agonists or antagonists of the present invention are used as a therapy for preventing the B cell proliferation and Ig secretion associated with autoimmune diseases such as idiopathic thrombocytopenic purpura, systemic lupus erythematosus and multiple sclerosis.

[0528] In another specific embodiment, polypeptides, antibodies, polynucleotides and/or agonists or antagonists of the present invention are used as a inhibitor of B and/or T cell migration in endothelial cells. This activity disrupts tissue architecture or cognate responses and is useful, for example in disrupting immune responses, and blocking sepsis.

[0529] In another specific embodiment, polypeptides, antibodies, polynucleotides and/or agonists or antagonists of the present invention are used as a therapy for chronic hypergammaglobulinemia evident in such diseases as monoclonal gammopathy of undetermined significance (MGUS), Waldenstrom's disease, related idiopathic monoclonal gammopathies, and plasmacytomas.

[0530] In another specific embodiment, polypeptides, antibodies, polynucleotides and/or agonists or antagonists of the present invention may be employed for instance to inhibit polypeptide chemotaxis and activation of macrophages and their precursors, and of neutrophils, basophils, B lymphocytes and some T-cell subsets, e.g., activated and CD8 cytotoxic T cells and natural killer cells, in certain autoimmune and chronic inflammatory and infective diseases. Examples of autoimmune diseases are described herein and include multiple sclerosis, and insulin-dependent diabetes.

[0531] The polypeptides, antibodies, polynucleotides and/or agonists or antagonists of the present invention may also be employed to treat idiopathic hyper-eosinophilic syndrome by, for example, preventing eosinophil production and migration.

[0532] In another specific embodiment, polypeptides, antibodies, polynucleotides and/or agonists or antagonists of the present invention are used to enhance or inhibit complement mediated cell lysis.

[0533] In another specific embodiment, polypeptides, antibodies, polynucleotides and/or agonists or antagonists of the present invention are used to enhance or inhibit antibody dependent cellular cytotoxicity.

[0534] In another specific embodiment, polypeptides, antibodies, polynucleotides and/or agonists or antagonists of the present invention may also be employed for treating atherosclerosis, for example, by preventing monocyte infiltration in the artery wall.

[0535] In another specific embodiment, polypeptides, antibodies, polynucleotides and/or agonists or antagonists of the present invention may be employed to treat adult respiratory distress syndrome (ARDS).

[0536] In another specific embodiment, polypeptides, antibodies, polynucleotides and/or agonists or antagonists of the present invention may be useful for stimulating wound and tissue repair, stimulating angiogenesis, and/or stimulating the repair of vascular or lymphatic diseases or disorders. Additionally, agonists and antagonists of the invention may be used to stimulate the regeneration of mucosal surfaces.

[0537] In a specific embodiment, polynucleotides or polypeptides, and/or agonists thereof are used to diagnose, prognose, treat, and/or prevent a disorder characterized by primary or acquired immunodeficiency, deficient serum immunoglobulin production, recurrent infections, and/or immune system dysfunction. Moreover, polynucleotides or polypeptides, and/or agonists thereof may be used to treat or prevent infections of the joints, bones, skin, and/or parotid glands, blood-borne infections (e.g., sepsis, meningitis, septic arthritis, and/or osteomyelitis), autoimmune diseases (e.g., those disclosed herein), inflammatory disorders, and malignancies, and/or any disease or disorder or condition associated with these infections, diseases, disorders and/or malignancies) including, but not limited to, CVID, other primary immune deficiencies, HIV disease, CLL, recurrent bronchitis, sinusitis, otitis media, conjunctivitis, pneumonia, hepatitis, meningitis, herpes zoster (e.g., severe herpes zoster), and/or pneumocystis carnii. Other diseases and disorders that may be prevented, diagnosed, prognosed, and/or treated with polynucleotides or polypeptides, and/or agonists of the present invention include, but are not limited to, HIV infection, HTLV-BLV infection, lymphopenia, phagocyte bactericidal dysfunction anemia, thrombocytopenia, and hemoglobinuria.

[0538] In another embodiment, polynucleotides, polypeptides, antibodies, and/or agonists or antagonists of the present invention are used to treat, and/or diagnose an individual having common variable immunodeficiency disease (“CVID”; also known as “acquired agammaglobulinemia” and “acquired hypogammaglobulinemia”)or a subset of this disease.

[0539] In a specific embodiment, polynucleotides, polypeptides, antibodies, and/or agonists or antagonists of the present invention may be used to diagnose, prognose, prevent, and/or treat cancers or neoplasms including immune cell or immune tissue-related cancers or neoplasms. Examples of cancers or neoplasms that may be prevented, diagnosed, or treated by polynucleotides, polypeptides, antibodies, and/or agonists or antagonists of the present invention include, but are not limited to, acute myelogenous leukemia, chronic myelogenous leukemia, Hodgkin's disease, non-Hodgkin's lymphoma, acute lymphocytic anemia (ALL) Chronic lymphocyte leukemia, plasmacytomas, multiple myeloma, Burkitt's lymphoma, EBV-transformed diseases, and/or diseases and disorders described in the section entitled “Hyperproliferative Disorders” elsewhere herein.

[0540] In another specific embodiment, polypeptides, antibodies, polynucleotides and/or agonists or antagonists of the present invention are used as a therapy for decreasing cellular proliferation of Large B-cell Lymphomas.

[0541] In another specific embodiment, polypeptides, antibodies, polynucleotides and/or agonists or antagonists of the present invention are used as a means of decreasing the involvement of B cells and Ig associated with Chronic Myelogenous Leukemia.

[0542] In specific embodiments, the compositions of the invention are used as an agent to boost immunoresponsiveness among B cell immunodeficient individuals, such as, for example, an individual who has undergone a partial or complete splenectomy.

[0543] Antagonists of the invention include, for example, binding and/or inhibitory antibodies, antisense nucleic acids, ribozymes or soluble forms of the polypeptides of the present invention (e.g., Fc fusion protein; see, e.g., Example 9). Agonists of the invention include, for example, binding or stimulatory antibodies, and soluble forms of the polypeptides (e.g., Fc fusion proteins; see, e.g., Example 9). Polypeptides, antibodies, polynucleotides and/or agonists or antagonists of the present invention may be employed in a composition with a pharmaceutically acceptable carrier, e.g., as described herein.

[0544] In another embodiment, polypeptides, antibodies, polynucleotides and/or agonists or antagonists of the present invention are administered to an animal (including, but not limited to, those listed above, and also including transgenic animals) incapable of producing functional endogenous antibody molecules or having an otherwise compromised endogenous immune system, but which is capable of producing human immunoglobulin molecules by means of a reconstituted or partially reconstituted immune system from another animal (see, e.g., published PCT Application Nos. WO98/24893, WO/9634096, WO/9633735, and WO/9110741). Administration of polypeptides, antibodies, polynucleotides and/or agonists or antagonists of the present invention to such animals is useful for the generation of monoclonal antibodies against the polypeptides, antibodies, polynucleotides and/or agonists or antagonists of the present invention.

### Blood-Related Disorders

[0545] The polynucleotides, polypeptides, antibodies, and/or agonists or antagonists of the present invention may be used to modulate hemostatic (the stopping of bleeding) or thrombolytic (clot dissolving) activity. For example, by increasing hemostatic or thrombolytic activity, polynucleotides or polypeptides, and/or agonists or antagonists of the present invention could be used to treat or prevent blood coagulation diseases, disorders, and/or conditions (e.g., afibrinogenemia, factor deficiencies, hemophilia), blood platelet diseases, disorders, and/or conditions (e.g., thrombocytopenia), or wounds resulting from trauma, surgery, or other causes. Alternatively, polynucleotides, polypeptides, antibodies, and/or agonists or antagonists of the present invention that can decrease hemostatic or thrombolytic activity could be used to inhibit or dissolve clotting. These molecules could be important in the treatment or prevention of heart attacks (infarction), strokes, or scarring.

[0546] In specific embodiments, the polynucleotides, polypeptides, antibodies, and/or agonists or antagonists of the present invention may be used to prevent, diagnose, prognose, and/or treat thrombosis, arterial thrombosis, venous thrombosis, thromboembolism, pulmonary embolism, atherosclerosis, myocardial infarction, transient ischemic attack, unstable angina. In specific embodiments, the polynucleotides, polypeptides, antibodies, and/or agonists or antagonists of the present invention may be used for the prevention of occlusion of saphenous grafts, for reducing the risk of periprocedural thrombosis as might accompany angioplasty procedures, for reducing the risk of stroke in patients with atrial fibrillation including nonrheumatic atrial fibrillation, for reducing the risk of embolism associated with mechanical heart valves and or mitral valves disease. Other uses for the polynucleotides, polypeptides, antibodies, and/or agonists or antagonists of the present invention, include, but are not limited to, the prevention of occlusions in extrcorporeal devices (e.g., intravascular canulas, vascular access shunts in hemodialysis patients, hemodialysis machines, and cardiopulmonary bypass machines).

[0547] In another embodiment, a polypeptide of the invention, or polynucleotides, antibodies, agonists, or antagonists corresponding to that polypeptide, may be used to prevent, diagnose, prognose, and/or treat diseases and disorders of the blood and/or blood forming organs associated with the tissue(s) in which the polypeptide of the invention is expressed, including one, two, three, four, five, or more tissues disclosed in Table 1A, column 7 (Tissue Distribution Library Code).

[0548] The polynucleotides, polypeptides, antibodies, and/or agonists or antagonists of the present invention may be used to modulate hematopoietic activity (the formation of blood cells). For example, the polynucleotides, polypeptides, antibodies, and/or agonists or antagonists of the present invention may be used to increase the quantity of all or subsets of blood cells, such as, for example, erythrocytes, lymphocytes (B or T cells), myeloid cells (e.g., basophils, eosinophils, neutrophils, mast cells, macrophages) and platelets. The ability to decrease the quantity of blood cells or subsets of blood cells may be useful in the prevention, detection, diagnosis and/or treatment of anemias and leukopenias described below. Alternatively, the polynucleotides, polypeptides, antibodies, and/or agonists or antagonists of the present invention may be used to decrease the quantity of all or subsets of blood cells, such as, for example, erythrocytes, lymphocytes (B or T cells), myeloid cells (e.g., basophils, eosinophils, neutrophils, mast cells, macrophages) and platelets. The ability to decrease the quantity of blood cells or subsets of blood cells may be useful in the prevention, detection, diagnosis and/or treatment of leukocytoses, such as, for example eosinophilia.

[0549] The polynucleotides, polypeptides, antibodies, and/or agonists or antagonists of the present invention may be used to prevent, treat, or diagnose blood dyscrasia.

[0550] Anemias are conditions in which the number of red blood cells or amount of hemoglobin (the protein that carries oxygen) in them is below normal. Anemia may be caused by excessive bleeding, decreased red blood cell production, or increased red blood cell destruction (hemolysis). The polynucleotides, polypeptides, antibodies, and/or agonists or antagonists of the present invention may be useful in treating, preventing, and/or diagnosing anemias. Anemias that may be treated prevented or diagnosed by the polynucleotides, polypeptides, antibodies, and/or agonists or antagonists of the present invention include iron deficiency anemia, hypochromic anemia, microcytic anemia, chlorosis, hereditary siderob;astic anemia, idiopathic acquired sideroblastic anemia, red cell aplasia, megaloblastic anemia (e.g., pernicious anemia, (vitamin B12 deficiency) and folic acid deficiency anemia), aplastic anemia, hemolytic anemias (e.g., autoimmune helolytic anemia, microangiopathic hemolytic anemia, and paroxysmal nocturnal hemoglobinuria). The polynucleotides, polypeptides, antibodies, and/or agonists or antagonists of the present invention may be useful in treating, preventing, and/or diagnosing anemias associated with diseases including but not limited to, anemias associated with systemic lupus erythematosus, cancers, lymphomas, chronic renal disease, and enlarged spleens. The polynucleotides, polypeptides, antibodies, and/or agonists or antagonists of the present invention may be useful in treating, preventing, and/or diagnosing anemias arising from drug treatments such as anemias associated with methyldopa, dapsone, and/or sulfadrugs. Additionally, rhe polynucleotides, polypeptides, antibodies, and/or agonists or antagonists of the present invention may be useful in treating, preventing, and/or diagnosing anemias associated with abnormal red blood cell architecture including but not limited to, hereditary spherocytosis, hereditary elliptocytosis, glucose-6-phosphate dehydrogenase deficiency, and sickle cell anemia.

[0551] The polynucleotides, polypeptides, antibodies, and/or agonists or antagonists of the present invention may be useful in treating, preventing, and/or diagnosing hemoglobin abnormalities, (e.g., those associated with sickle cell anemia, hemoglobin C disease, hemoglobin S-C disease, and hemoglobin E disease). Additionally, the polynucleotides, polypeptides, antibodies, and/or agonists or antagonists of the present invention may be useful in diagnosing, prognosing, preventing, and/or treating thalassemias, including, but not limited to major and minor forms of alpha-thalassemia and beta-thalassemia.

[0552] In another embodiment, the polynucleotides, polypeptides, antibodies, and/or agonists or antagonists of the present invention may be useful in diagnosing, prognosing, preventing, and/or treating bleeding disorders including, but not limited to, thrombocytopenia (e.g., idiopathic thrombocytopenic purpura, and thrombotic thrombocytopenic purpura), Von Willebrand's disease, hereditary platelet disorders (e.g., storage pool disease such as Chediak-Higashi and Hermansky-Pudlak syndromes, thromboxane A2 dysfunction, thromboasthenia, and Bernard-Soulier syndrome), hemolytic-uremic syndrome, hemophelias such as hemophelia A or Factor VII deficiency and Christmas disease or Factor IX deficiency, Hereditary Hemorhhagic Telangiectsia, also known as Rendu-Osler-Weber syndrome, allergic purpura (Henoch Schonlein purpura) and disseminated intravascular coagulation.

[0553] The effect of the polynucleotides, polypeptides, antibodies, and/or agonists or antagonists of the present invention on the clotting time of blood may be monitored using any of the clotting tests known in the art including, but not limited to, whole blood partial thromboplastin time (PTT), the activated partial thromboplastin time (aPTT), the activated clotting time (ACT), the recalcified activated clotting time, or the Lee-White Clotting time.

[0554] Several diseases and a variety of drugs can cause platelet dysfunction. Thus, in a specific embodiment, the polynucleotides, polypeptides, antibodies, and/or agonists or antagonists of the present invention may be useful in diagnosing, prognosing, preventing, and/or treating acquired platelet dysfunction such as platelet dysfunction accompanying kidney failure, leukemia, multiple myeloma, cirrhosis of the liver, and systemic lupus erythematosus as well as platelet dysfunction associated with drug treatments, including treatment with aspirin, ticlopidine, nonsteroidal anti-inflammatory drugs (used for arthritis, pain, and sprains), and penicillin in high doses.

[0555] In another embodiment, the polynucleotides, polypeptides, antibodies, and/or agonists or antagonists of the present invention may be useful in diagnosing, prognosing, preventing, and/or treating diseases and disorders characterized by or associated with increased or decreased numbers of white blood cells. Leukopenia occurs when the number of white blood cells decreases below normal. Leukopenias include, but are not limited to, neutropenia and lymphocytopenia. An increase in the number of white blood cells compared to normal is known as leukocytosis. The body generates increased numbers of white blood cells during infection. Thus, leukocytosis may simply be a normal physiological parameter that reflects infection. Alternatively, leukocytosis may be an indicator of injury or other disease such as cancer. Leokocytoses, include but are not limited to, eosinophilia, and accumulations of macrophages. In specific embodiments, the polynucleotides, polypeptides, antibodies, and/or agonists or antagonists of the present invention may be useful in diagnosing, prognosing, preventing, and/or treating leukopenia. In other specific embodiments, the polynucleotides, polypeptides, antibodies, and/or agonists or antagonists of the present invention may be useful in diagnosing, prognosing, preventing, and/or treating leukocytosis

[0556] Leukopenia may be a generalized decreased in all types of white blood cells, or may be a specific depletion of particular types of white blood cells. Thus, in specific embodiments, the polynucleotides, polypeptides, antibodies, and/or agonists or antagonists of the present invention may be useful in diagnosing, prognosing, preventing, and/or treating decreases in neutrophil numbers, known as neutropenia. Neutropenias that may be diagnosed, prognosed, prevented, and/or treated by the polynucleotides, polypeptides, antibodies, and/or agonists or antagonists of the present invention include, but are not limited to, infantile genetic agranulocytosis, familial neutropenia, cyclic neutropenia, neutropenias resulting from or associated with dietary deficiencies (e.g., vitamin B 12 deficiency or folic acid deficiency), neutropenias resulting from or associated with drug treatments (e.g., antibiotic regimens such as penicillin treatment, sulfonamide treatment, anticoagulant treatment, anticonvulsant drugs, anti-thyroid drugs, and cancer chemotherapy), and neutropenias resulting from increased neutrophil destruction that may occur in association with some bacterial or viral infections, allergic disorders, autoimmune diseases, conditions in which an individual has an enlarged spleen (e.g., Felty syndrome, malaria and sarcoidosis), and some drug treatment regimens.

[0557] The polynucleotides, polypeptides, antibodies, and/or agonists or antagonists of the present invention may be useful in diagnosing, prognosing, preventing, and/or treating lymphocytopenias (decreased numbers of B and/or T lymphocytes), including, but not limited lymphocytopenias resulting from or associated with stress, drug treatments (e.g., drug treatment with corticosteroids, cancer chemotherapies, and/or radiation therapies), AIDS infection and/or other diseases such as, for example, cancer, rheumatoid arthritis, systemic lupus erythematosus, chronic infections, some viral infections and/or hereditary disorders (e.g., DiGeorge syndrome, Wiskott-Aldrich Syndome, severe combined immunodeficiency, ataxia telangiectsia).

[0558] The polynucleotides, polypeptides, antibodies, and/or agonists or antagonists of the present invention may be useful in diagnosing, prognosing, preventing, and/or treating diseases and disorders associated with macrophage numbers and/or macrophage function including, but not limited to, Gaucher's disease, Niemann-Pick disease, Letterer-Siwe disease and Hand-Schuller-Christian disease.

[0559] In another embodiment, the polynucleotides, polypeptides, antibodies, and/or agonists or antagonists of the present invention may be useful in diagnosing, prognosing, preventing, and/or treating diseases and disorders associated with eosinophil numbers and/or eosinophil function including, but not limited to, idiopathic hypereosinophilic syndrome, eosinophilia-myalgia syndrome, and Hand-Schuller-Christian disease.

[0560] In yet another embodiment, the polynucleotides, polypeptides, antibodies, and/or agonists or antagonists of the present invention may be useful in diagnosing, prognosing, preventing, and/or treating leukemias and lymphomas including, but not limited to, acute lymphocytic (lymphpblastic) leukemia (ALL), acute myeloid (myelocytic, myelogenous, myeloblastic, or myelomonocytic) leukemia, chronic lymphocytic leukemia (e.g., B cell leukemias, T cell leukemias, Sezary syndrome, and Hairy cell leukenia), chronic myelocytic (myeloid, myelogenous, or granulocytic) leukemia, Hodgkin's lymphoma, non-hodgkin's lymphoma, Burkitt's lymphoma, and mycosis fungoides.

[0561] In other embodiments, the polynucleotides, polypeptides, antibodies, and/or agonists or antagonists of the present invention may be useful in diagnosing, prognosing, preventing, and/or treating diseases and disorders of plasma cells including, but not limited to, plasma cell dyscrasias, monoclonal gammaopathies, monoclonal gammopathies of undetermined significance, multiple myeloma, macroglobulinemia, Waldenstrom's macroglobulinemia, cryoglobulinemia, and Raynaud's phenomenon.

[0562] In other embodiments, the polynucleotides, polypeptides, antibodies, and/or agonists or antagonists of the present invention may be useful in treating, preventing, and/or diagnosing myeloproliferative disorders, including but not limited to, polycythemia vera, relative polycythemia, secondary polycythemia, myelofibrosis, acute myelofibrosis, agnogenic myelod metaplasia, thrombocythemia, (including both primary and secondary thrombocythemia) and chronic myelocytic leukemia.

[0563] In other embodiments, the polynucleotides, polypeptides, antibodies, and/or agonists or antagonists of the present invention may be useful as a treatment prior to surgery, to increase blood cell production.

[0564] In other embodiments, the polynucleotides, polypeptides, antibodies, and/or agonists or antagonists of the present invention may be useful as an agent to enhance the migration, phagocytosis, superoxide production, antibody dependent cellular cytotoxicity of neutrophils, eosionophils and macrophages.

[0565] In other embodiments, the polynucleotides, polypeptides, antibodies, and/or agonists or antagonists of the present invention may be useful as an agent to increase the number of stem cells in circulation prior to stem cells pheresis. In another specific embodiment, the polynucleotides, polypeptides, antibodies, and/or agonists or antagonists of the present invention may be useful as an agent to increase the number of stem cells in circulation prior to platelet pheresis.

[0566] In other embodiments, the polynucleotides, polypeptides, antibodies, and/or agonists or antagonists of the present invention may be useful as an agent to increase cytokine production.

[0567] In other embodiments, the polynucleotides, polypeptides, antibodies, and/or agonists or antagonists of the present invention may be useful in preventing, diagnosing, and/or treating primary hematopoietic disorders.

### Hyperproliferative Disorders

[0568] Liver associated polynucleotides or polypeptides, or agonists or antagonists thereof, can be used to treat, prevent, diagnose and/or prognose hyperproliferative diseases, disorders, and/or conditions, including neoplasms.

[0569] In a specific embodiment, liver associated polynucleotides or polypeptides, or agonists or antagonists thereof, can be used to treat, prevent, and/or diagnose hyperproliferative diseases, disorders, and/or conditions of the liver.

[0570] In a preferred embodiment, liver associated polynucleotides or polypeptides, or agonists or antagonists thereof, can be used to treat, prevent, and/or diagnose liver neoplasms.

[0571] Liver associated polynucleotides or polypeptides, or agonists or antagonists of the invention, may inhibit the proliferation of the disorder through direct or indirect interactions. Alternatively, liver associated polynucleotides or polypeptides, or agonists or antagonists thereof, may proliferate other cells, which can inhibit the hyperproliferative disorder.

[0572] For example, by increasing an immune response, particularly increasing antigenic qualities of the hyperproliferative disorder or by proliferating, differentiating, or mobilizing T-cells, hyperproliferative diseases, disorders, and/or conditions can be treated, prevented, and/or diagnosed. This immune response may be increased by either enhancing an existing immune response, or by initiating a new immune response. Alternatively, decreasing an immune response may also be a method of treating, preventing, and/or diagnosing hyperproliferative diseases, disorders, and/or conditions, such as a chemotherapeutic agent.

[0573] Examples of hyperproliferative diseases, disorders, and/or conditions that can be treated, prevented, and/or diagnosed by liver associated polynucleotides or polypeptides, or agonists or antagonists thereof, include, but are not limited to neoplasms located in the: prostate, colon, abdomen, bone, breast, digestive system, liver, pancreas, peritoneum, endocrine glands (adrenal, parathyroid, pituitary, testicles, ovary, thymus, thyroid), eye, head and neck, nervous (central and peripheral), lymphatic system, pelvic, skin, soft tissue, spleen, thoracic, and urogenital.

[0574] Similarly, other hyperproliferative disorders can also be treated or detected by polynucleotides or polypeptides, or agonists or antagonists of the present invention. Examples of such hyperproliferative disorders include, but are not limited to: Acute Childhood Lymphoblastic Leukemia, Acute Lymphoblastic Leukemia, Acute Lymphocytic Leukemia, Acute Myeloid Leukemia, Adrenocortical Carcinoma, Adult (Primary) Hepatocellular Cancer, Adult (Primary) Liver Cancer, Adult Acute Lymphocytic Leukemia, Adult Acute Myeloid Leukemia, Adult Hodgkin's Disease, Adult Hodgkin's Lymphoma, Adult Lymphocytic Leukemia, Adult Non-Hodgkin's Lymphoma, Adult Primary Liver Cancer, Adult Soft Tissue Sarcoma, AIDS-Related Lymphoma, AIDS-Related Malignancies, Anal Cancer, Astrocytoma, Bile Duct Cancer, Bladder Cancer, Bone Cancer, Brain Stem Glioma, Brain Tumors, Breast Cancer, Cancer of the Renal Pelvis and Ureter, Central Nervous System (Primary) Lymphoma, Central Nervous System Lymphoma, Cerebellar Astrocytoma, Cerebral Astrocytoma, Cervical Cancer, Childhood (Primary) Hepatocellular Cancer, Childhood (Primary) Liver Cancer, Childhood Acute Lymphoblastic Leukemia, Childhood Acute Myeloid Leukemia, Childhood Brain Stem Glioma, Childhood Cerebellar Astrocytoma, Childhood Cerebral Astrocytoma, Childhood Extracranial Germ Cell Tumors, Childhood Hodgkin's Disease, Childhood Hodgkin's Lymphoma, Childhood Hypothalamic and Visual Pathway Glioma, Childhood Lymphoblastic Leukemia, Childhood Medulloblastoma, Childhood Non-Hodgkin's Lymphoma, Childhood Pineal and Supratentorial Primitive Neuroectodermal Tumors, Childhood Primary Liver Cancer, Childhood Rhabdomyosarcoma, Childhood Soft Tissue Sarcoma, Childhood Visual Pathway and Hypothalamic Glioma, Chronic Lymphocytic Leukemia, Chronic Myelogenous Leukemia, Colon Cancer, Cutaneous T-Cell Lymphoma, Endocrine Pancreas Islet Cell Carcinoma, Endometrial Cancer, Ependymoma, Epithelial Cancer, Esophageal Cancer, Ewing's Sarcoma and Related Tumors, Exocrine Pancreatic Cancer, Extracranial Germ Cell Tumor, Extragonadal Germ Cell Tumor, Extrahepatic Bile Duct Cancer, Eye Cancer, Female Breast Cancer, Gaucher's Disease, Gallbladder Cancer, Gastric Cancer, Gastrointestinal Carcinoid Tumor, Gastrointestinal Tumors, Germ Cell Tumors, Gestational Trophoblastic Tumor, Hairy Cell Leukemia, Head and Neck Cancer, Hepatocellular Cancer, Hodgkin's Disease, Hodgkin's Lymphoma, Hypergammaglobulinemia, Hypopharyngeal Cancer, Intestinal Cancers, Intraocular Melanoma, Islet Cell Carcinoma, Islet Cell Pancreatic Cancer, Kaposi's Sarcoma, Kidney Cancer, Laryngeal Cancer, Lip and Oral Cavity Cancer, Liver Cancer, Lung Cancer, Lymphoproliferative Disorders, Macroglobulinemia, Male Breast Cancer, Malignant Mesothelioma, Malignant Thymoma, Medulloblastoma, Melanoma, Mesothelioma, Metastatic Occult Primary Squamous Neck Cancer, Metastatic Primary Squamous Neck Cancer, Metastatic Squamous Neck Cancer, Multiple Myeloma, Multiple Myeloma/Plasma Cell Neoplasm, Myelodysplastic Syndrome, Myelogenous Leukemia, Myeloid Leukemia, Myeloproliferative Disorders, Nasal Cavity and Paranasal Sinus Cancer, Nasopharyngeal Cancer, Neuroblastoma, Non-Hodgkin's Lymphoma During Pregnancy, Nonmelanoma Skin Cancer, Non-Small Cell Lung Cancer, Occult Primary Metastatic Squamous Neck Cancer, Oropharyngeal Cancer, Osteo-/Malignant Fibrous Sarcoma, Osteosarcoma/Malignant Fibrous Histiocytoma, Osteosarcoma/Malignant Fibrous Histiocytoma of Bone, Ovarian Epithelial Cancer, Ovarian Germ Cell Tumor, Ovarian Low Malignant Potential Tumor, Pancreatic Cancer, Paraproteinemias, Purpura, Parathyroid Cancer, Penile Cancer, Pheochromocytoma, Pituitary Tumor, Plasma Cell Neoplasm/Multiple Myeloma, Primary Central Nervous System Lymphoma, Primary Liver Cancer, Prostate Cancer, Rectal Cancer, Renal Cell Cancer, Renal Pelvis and Ureter Cancer, Retinoblastoma, Rhabdomyosarcoma, Salivary Gland Cancer, Sarcoidosis Sarcomas, Sezary Syndrome, Skin Cancer, Small Cell Lung Cancer, Small Intestine Cancer, Soft Tissue Sarcoma, Squamous Neck Cancer, Stomach Cancer, Supratentorial Primitive Neuroectodermal and Pineal Tumors, T-Cell Lymphoma, Testicular Cancer, Thymoma, Thyroid Cancer, Transitional Cell Cancer of the Renal Pelvis and Ureter, Transitional Renal Pelvis and Ureter Cancer, Trophoblastic Tumors, Ureter and Renal Pelvis Cell Cancer, Urethral Cancer, Uterine Cancer, Uterine Sarcoma, Vaginal Cancer, Visual Pathway and Hypothalamic Glioma, Vulvar Cancer, Waldenstrom's Macroglobulinemia, Wilms' Tumor, and any other hyperproliferative disease, besides neoplasia, located in an organ system listed above.

[0575] In another preferred embodiment, polynucleotides or polypeptides, or agonists or antagonists of the present invention are used to diagnose, prognose, prevent, and/or treat premalignant conditions and to prevent progression to a neoplastic or malignant state, including but not limited to those disorders described above. Such uses are indicated in conditions known or suspected of preceding progression to neoplasia or cancer, in particular, where non-neoplastic cell growth consisting of hyperplasia, metaplasia, or most particularly, dysplasia has occurred (for review of such abnormal growth conditions, see Robbins and Angell, 1976, Basic Pathology, 2d Ed., W. B. Saunders Co., Philadelphia, pp. 68-79.)

[0576] Hyperplasia is a form of controlled cell proliferation, involving an increase in cell number in a tissue or organ, without significant alteration in structure or function. Hyperplastic disorders which can be diagnosed, prognosed, prevented, and/or treated with compositions of the invention (including polynucleotides, polypeptides, agonists or antagonists) include, but are not limited to, angiofollicular mediastinal lymph node hyperplasia, angiolymphoid hyperplasia with eosinophilia, atypical melanocytic hyperplasia, basal cell hyperplasia, benign giant lymph node hyperplasia, cementum hyperplasia, congenital adrenal hyperplasia, congenital sebaceous hyperplasia, cystic hyperplasia, cystic hyperplasia of the breast, denture hyperplasia, ductal hyperplasia, endometrial hyperplasia, fibromuscular hyperplasia, focal epithelial hyperplasia, gingival hyperplasia, inflammatory fibrous hyperplasia, inflammatory papillary hyperplasia, intravascular papillary endothelial hyperplasia, nodular hyperplasia of prostate, nodular regenerative hyperplasia, pseudoepitheliomatous hyperplasia, senile sebaceous hyperplasia, and verrucous hyperplasia.

[0577] Metaplasia is a form of controlled cell growth in which one type of adult or fully differentiated cell substitutes for another type of adult cell. Metaplastic disorders which can be diagnosed, prognosed, prevented, and/or treated with compositions of the invention (including polynucleotides, polypeptides, agonists or antagonists) include, but are not limited to, agnogenic myeloid metaplasia, apocrine metaplasia, atypical metaplasia, autoparenchymatous metaplasia, connective tissue metaplasia, epithelial metaplasia, intestinal metaplasia, metaplastic anemia, metaplastic ossification, metaplastic polyps, myeloid metaplasia, primary myeloid metaplasia, secondary myeloid metaplasia, squamous metaplasia, squamous metaplasia of amnion, and symptomatic myeloid metaplasia.

[0578] Dysplasia is frequently a forerunner of cancer, and is found mainly in the epithelia; it is the most disorderly form of non-neoplastic cell growth, involving a loss in individual cell uniformity and in the architectural orientation of cells. Dysplastic cells often have abnormally large, deeply stained nuclei, and exhibit pleomorphism. Dysplasia characteristically occurs where there exists chronic irritation or inflammation. Dysplastic disorders which can be diagnosed, prognosed, prevented, and/or treated with compositions of the invention (including polynucleotides, polypeptides, agonists or antagonists) include, but are not limited to, anhidrotic ectodermal dysplasia, anterofacial dysplasia, asphyxiating thoracic dysplasia, atriodigital dysplasia, bronchopulmonary dysplasia, cerebral dysplasia, cervical dysplasia, chondroectodermal dysplasia, cleidocranial dysplasia, congenital ectodermal dysplasia, craniodiaphysial dysplasia, craniocarpotarsal dysplasia, craniometaphysial dysplasia, dentin dysplasia, diaphysial dysplasia, ectodermal dysplasia, enamel dysplasia, encephalo-ophthalmic dysplasia, dysplasia epiphysialis hemimelia, dysplasia epiphysialis multiplex, dysplasia epiphysialis punctata, epithelial dysplasia, faciodigitogenital dysplasia, familial fibrous dysplasia of jaws, familial white folded dysplasia, fibromuscular dysplasia, fibrous dysplasia of bone, florid osseous dysplasia, hereditary renal-retinal dysplasia, hidrotic ectodermal dysplasia, hypohidrotic ectodermal dysplasia, lymphopenic thymic dysplasia, mammary dysplasia, mandibulofacial dysplasia, metaphysial dysplasia, Mondini dysplasia, monostotic fibrous dysplasia, mucoepithelial dysplasia, multiple epiphysial dysplasia, oculoauriculovertebral dysplasia, oculodentodigital dysplasia, oculovertebral dysplasia, odontogenic dysplasia, ophthalmomandibulomelic dysplasia, periapical cemental dysplasia, polyostotic fibrous dysplasia, pseudoachondroplastic spondyloepiphysial dysplasia, retinal dysplasia, septo-optic dysplasia, spondyloepiphysial dysplasia, and ventriculoradial dysplasia.

[0579] Additional pre-neoplastic disorders which can be diagnosed, prognosed, prevented, and/or treated with compositions of the invention (including polynucleotides, polypeptides, agonists or antagonists) include, but are not limited to, benign dysproliferative disorders (e.g., benign tumors, fibrocystic conditions, tissue hypertrophy, intestinal polyps, colon polyps, and esophageal dysplasia), leukoplakia, keratoses, Bowen's disease, Farmer's Skin, solar cheilitis, and solar keratosis.

[0580] In another embodiment, a polypeptide of the invention, or polynucleotides, antibodies, agonists, or antagonists corresponding to that polypeptide, may be used to diagnose and/or prognose disorders associated with the tissue(s) in which the polypeptide of the invention is expressed, including one, two, three, four, five, or more tissues disclosed in Table 1A, 7 (Tissue Distribution Library Code).

[0581] In another embodiment, polynucleotides, polypeptides, antibodies, and/or agonists or antagonists of the present invention conjugated to a toxin or a radioactive isotope, as described herein, may be used to treat cancers and neoplasms, including, but not limited to those described herein. In a further preferred embodiment, polynucleotides, polypeptides, antibodies, and/or agonists or antagonists of the present invention conjugated to a toxin or a radioactive isotope, as described herein, may be used to treat acute myelogenous leukemia.

[0582] Additionally, polynucleotides, polypeptides, and/or agonists or antagonists of the invention may affect apoptosis, and therefore, would be useful in treating a number of diseases associated with increased cell survival or the inhibition of apoptosis. For example, diseases associated with increased cell survival or the inhibition of apoptosis that could be diagnosed, prognosed, prevented, and/or treated by polynucleotides, polypeptides, and/or agonists or antagonists of the invention, include cancers (such as follicular lymphomas, carcinomas with p53 mutations, and hormone-dependent tumors, including, but not limited to colon cancer, cardiac tumors, pancreatic cancer, melanoma, retinoblastoma, glioblastoma, lung cancer, intestinal cancer, testicular cancer, stomach cancer, neuroblastoma, myxoma, myoma, lymphoma, endothelioma, osteoblastoma, osteoclastoma, osteosarcoma, chondrosarcoma, adenoma, breast cancer, prostate cancer, Kaposi's sarcoma and ovarian cancer); autoimmune disorders such as, multiple sclerosis, Sjogren's syndrome, Hashimoto's thyroiditis, biliary cirrhosis, Behet's disease, Crohn's disease, polymyositis, systemic lupus erythematosus and immune-related glomerulonephritis and rheumatoid arthritis) and viral infections (such as herpes viruses, pox viruses and adenoviruses), inflammation, graft v. host disease, acute graft rejection, and chronic graft rejection.

[0583] In preferred embodiments, polynucleotides, polypeptides, and/or agonists or antagonists of the invention are used to inhibit growth, progression, and/or metastasis of cancers, in particular those listed above.

[0584] Additional diseases or conditions associated with increased cell survival that could be diagnosed, prognosed, prevented, and/or treated by polynucleotides, polypeptides, and/or agonists or antagonists of the invention, include, but are not limited to, progression, and/or metastases of malignancies and related disorders such as leukemia (including acute leukemias (e.g., acute lymphocytic leukemia, acute myelocytic leukemia (including myeloblastic, promyelocytic, myelomonocytic, monocytic, and erythroleukemia)) and chronic leukemias (e.g., chronic myelocytic (granulocytic) leukemia and chronic lymphocytic leukemia)), polycythemia vera, lymphomas (e.g., Hodgkin's disease and non-Hodgkin's disease), multiple myeloma, Waldenstrom's macroglobulinemia, heavy chain disease, and solid tumors including, but not limited to, sarcomas and carcinomas such as fibrosarcoma, myxosarcoma, liposarcoma, chondrosarcoma, osteogenic sarcoma, chordoma, angiosarcoma, endotheliosarcoma, lymphangiosarcoma, lymphangioendotheliosarcoma, synovioma, mesothelioma, Ewing's tumor, leiomyosarcoma, rhabdomyosarcoma, colon carcinoma, pancreatic cancer, breast cancer, ovarian cancer, prostate cancer, squamous cell carcinoma, basal cell carcinoma, adenocarcinoma, sweat gland carcinoma, sebaceous gland carcinoma, papillary carcinoma, papillary adenocarcinomas, cystadenocarcinoma, medullary carcinoma, bronchogenic carcinoma, renal cell carcinoma, hepatoma, bile duct carcinoma, choriocarcinoma, seminoma, embryonal carcinoma, Wilm's tumor, cervical cancer, testicular tumor, lung carcinoma, small cell lung carcinoma, bladder carcinoma, epithelial carcinoma, glioma, astrocytoma, medulloblastoma, craniopharyngioma, ependymoma, pinealoma, emangioblastoma, acoustic neuroma, oligodendroglioma, menangioma, melanoma, neuroblastoma, and retinoblastoma.

[0585] Diseases associated with increased apoptosis that could be diagnosed, prognosed, prevented, and/or treated by polynucleotides, polypeptides, and/or agonists or antagonists of the invention, include AIDS; neurodegenerative disorders (such as Alzheimer's disease, Parkinson's disease, amyotrophic lateral sclerosis, retinitis pigmentosa, cerebellar degeneration and brain tumor or prior associated disease); autoimmune disorders (such as, multiple sclerosis, Sjogren's syndrome, Hashimoto's thyroiditis, biliary cirrhosis, Behcet's disease, Crohn's disease, polymyositis, systemic lupus erythematosus and immune-related glomerulonephritis and rheumatoid arthritis) myelodysplastic syndromes (such as aplastic anemia), graft v. host disease, ischemic injury (such as that caused by myocardial infarction, stroke and reperfusion injury), liver injury (e.g., hepatitis related liver injury, ischemia/reperfusion injury, cholestosis (bile duct injury) and liver cancer); toxin-induced liver disease (such as that caused by alcohol), septic shock, cachexia and anorexia.

[0586] Hyperproliferative diseases and/or disorders that could be diagnosed, prognosed, prevented, and/or treated by polynucleotides, polypeptides, and/or agonists or antagonists of the invention, include, but are not limited to, neoplasms located in the liver, abdomen, bone, breast, digestive system, pancreas, peritoneum, endocrine glands (adrenal, parathyroid, pituitary, testicles, ovary, thymus, thyroid), eye, head and neck, nervous system (central and peripheral), lymphatic system, pelvis, skin, soft tissue, spleen, thorax, and urogenital tract.

[0587] Similarly, other hyperproliferative disorders can also be diagnosed, prognosed, prevented, and/or treated by polynucleotides, polypeptides, and/or agonists or antagonists of the invention. Examples of such hyperproliferative disorders include, but are not limited to: hypergammaglobulinemia, lymphoproliferative disorders, paraproteinemias, purpura, sarcoidosis, Sezary Syndrome, Waldenstron's macroglobulinemia, Gaucher's Disease, histiocytosis, and any other hyperproliferative disease, besides neoplasia, located in an organ system listed above.

[0588] One preferred embodiment utilizes polynucleotides of the present invention to inhibit aberrant cellular division, by gene therapy using the present invention, and/or protein fusions or fragments thereof.

[0589] Thus, the present invention provides a method for treating cell proliferative diseases, disorders, and/or conditions by inserting into an abnormally proliferating cell a polynucleotide of the present invention, wherein said polynucleotide represses said cell proliferation, disease, disorder, and/or condition.

[0590] In a preferred embodiment, the present invention provides a method for treating cell proliferative diseases, disorders and/or conditions of the liver by inserting into a cell, a polynucleotide of the present invention, wherein said polynucleotide represses said cell proliferation, disease and/or disorder.

[0591] Another embodiment of the present invention provides a method of treating cell-proliferative diseases, disorders, and/or conditions in individuals comprising administration of one or more active gene copies of the present invention to an abnormally proliferating cell or cells. In a preferred embodiment, polynucleotides of the present invention is a DNA construct comprising a recombinant expression vector effective in expressing a DNA sequence encoding said polynucleotides. In another preferred embodiment of the present invention, the DNA construct encoding the polynucleotides of the present invention is inserted into cells to be treated utilizing a retrovirus, or more preferably an adenoviral vector (see, e.g., G J. Nabel, et. al., PNAS 96: 324-326 (1999), which is hereby incorporated by reference). In a most preferred embodiment, the viral vector is defective and will not transform non-proliferating cells, only proliferating cells. Moreover, in a preferred embodiment, the polynucleotides of the present invention inserted into proliferating cells either alone, or in combination with or fused to other polynucleotides, can then be modulated via an external stimulus (i.e., magnetic, specific small molecule, chemical, or drug administration, etc.), which acts upon the promoter upstream of said polynucleotides to induce expression of the encoded protein product. As such the beneficial therapeutic affect of the present invention may be expressly modulated (i.e., to increase, decrease, or inhibit expression of the present invention) based upon said external stimulus.

[0592] Polynucleotides of the present invention may be useful in repressing expression of oncogenic genes or antigens. By “repressing expression of the oncogenic genes ” is intended the suppression of the transcription of the gene, the degradation of the gene transcript (pre-message RNA), the inhibition of splicing, the destruction of the messenger RNA, the prevention of the post-translational modifications of the protein, the destruction of the protein, or the inhibition of the normal function of the protein.

[0593] For local administration to abnormally proliferating cells, polynucleotides of the present invention may be administered by any method known to those of skill in the art including, but not limited to transfection, electroporation, microinjection of cells, or in vehicles such as liposomes, lipofectin, or as naked polynucleotides, or any other method described throughout the specification. The polynucleotide of the present invention may be delivered by known gene delivery systems such as, but not limited to, retroviral vectors (Gilboa, J. Virology 44:845 (1982); Hocke, Nature 320:275 (1986); Wilson, et al., Proc. Natl. Acad. Sci. U.S.A. 85:3014), vaccinia virus system (Chakrabarty et al., Mol. Cell Biol. 5:3403 (1985) or other efficient DNA delivery systems (Yates et al., Nature 313:812 (1985)) known to those skilled in the art. These references are exemplary only and are hereby incorporated by reference. In order to specifically deliver or transfect cells which are abnormally proliferating and spare non-dividing cells, it is preferable to utilize a retrovirus, or adenoviral (as described in the art and elsewhere herein) delivery system known to those of skill in the art. Since host DNA replication is required for retroviral DNA to integrate and the retrovirus will be unable to self replicate due to the lack of the retrovirus genes needed for its life cycle. Utilizing such a retroviral delivery system for polynucleotides of the present invention will target said gene and constructs to abnormally proliferating cells and will spare the non-dividing normal cells.

[0594] The polynucleotides of the present invention may be delivered directly to cell proliferative disorder/disease sites in internal organs, body cavities and the like by use of imaging devices used to guide an injecting needle directly to the disease site. The polynucleotides of the present invention may also be administered to disease sites at the time of surgical intervention.

[0595] By “cell proliferative disease” is meant any human or animal disease or disorder, affecting any one or any combination of organs, cavities, or body parts, which is characterized by single or multiple local abnormal proliferations of cells, groups of cells, or tissues, whether benign or malignant.

[0596] Any amount of the polynucleotides of the present invention may be administered as long as it has a biologically inhibiting effect on the proliferation of the treated cells. Moreover, it is possible to administer more than one of the polynucleotide of the present invention simultaneously to the same site. By “biologically inhibiting” is meant partial or total growth inhibition as well as decreases in the rate of proliferation or growth of the cells. The biologically inhibitory dose may be determined by assessing the effects of the polynucleotides of the present invention on target malignant or abnormally proliferating cell growth in tissue culture, tumor growth in animals and cell cultures, or any other method known to one of ordinary skill in the art.

[0597] The present invention is further directed to antibody-based therapies which involve administering of anti-polypeptides and anti-polynucleotide antibodies to a mammalian, preferably human, patient for treating one or more of the described diseases, disorders, and/or conditions. Methods for producing anti-polypeptides and anti-polynucleotide antibodies polyclonal and monoclonal antibodies are described in detail elsewhere herein. Such antibodies may be provided in pharmaceutically acceptable compositions as known in the art or as described herein.

[0598] A summary of the ways in which the antibodies of the present invention may be used therapeutically includes binding polynucleotides or polypeptides of the present invention locally or systemically in the body or by direct cytotoxicity of the antibody, e.g., as mediated by complement (CDC) or by effector cells (ADCC). Some of these approaches are described in more detail below. Armed with the teachings provided herein, one of ordinary skill in the art will know how to use the antibodies of the present invention for diagnostic, monitoring or therapeutic purposes without undue experimentation.

[0599] In particular, the antibodies, fragments and derivatives of the present invention are useful for treating a subject having or developing cell proliferative and/or differentiation diseases, disorders, and/or conditions as described herein. Such treatment comprises administering a single or multiple doses of the antibody, or a fragment, derivative, or a conjugate thereof.

[0600] The antibodies of this invention may be advantageously utilized in combination with other monoclonal or chimeric antibodies, or with lymphokines or hematopoietic growth factors, for example, which serve to increase the number or activity of effector cells which interact with the antibodies.

[0601] It is preferred to use high affinity and/or potent in vivo inhibiting and/or neutralizing antibodies against polypeptides or polynucleotides of the present invention, fragments or regions thereof, for both immunoassays directed to and therapy of diseases, disorders, and/or conditions related to polynucleotides or polypeptides, including fragments thereof, of the present invention. Such antibodies, fragments, or regions, will preferably have an affinity for polynucleotides or polypeptides, including fragments thereof. Preferred binding affinities include those with a dissociation constant or Kd less than 5×10⁻⁶M, 10⁻⁶M, 5×10⁻⁷M, 10⁻⁷M, 5×10⁻⁸M, 10⁻⁸M, 5×10⁻⁹M, 10⁻⁹M, 5×10⁻¹⁰M, 10⁻¹⁰M, 5×10⁻¹¹M, 10⁻¹¹M, 5×10⁻¹²M, 10⁻¹²M, 5×10⁻¹³M, 10⁻¹³M, 5×10⁻¹⁴M, 10⁻¹⁴M, 5×10⁻¹⁵M, and 10⁻¹⁵M.

[0602] Moreover, liver antigen polypeptides of the present invention or fragments thereof, are useful in inhibiting the angiogenesis of proliferative cells or tissues, either alone, as a protein fusion, or in combination with other polypeptides directly or indirectly, as described elsewhere herein. In a most preferred embodiment, said anti-angiogenesis effect may be achieved indirectly, for example, through the inhibition of hematopoietic, tumor-specific cells, such as tumor-associated macrophages (see, e.g., Joseph I B, et al. J Natl Cancer Inst, 90(21):1648-53 (1998), which is hereby incorporated by reference). Antibodies directed to polypeptides or polynucleotides of the present invention may also result in inhibition of angiogenesis directly, or indirectly (see, e.g., Witte L, et al., Cancer Metastasis Rev. 17(2):155-61 (1998), which is hereby incorporated by reference)).

[0603] Polypeptides, including protein fusions, of the present invention, or fragments thereof may be useful in inhibiting proliferative cells or tissues through the induction of apoptosis. Said polypeptides may act either directly, or indirectly to induce apoptosis of proliferative cells and tissues, for example in the activation of a death-domain receptor, such as tumor necrosis factor (TNF) receptor-1, CD95 (Fas/APO-1), TNF-receptor-related apoptosis-mediated protein (TRAMP) and TNF-related apoptosis-inducing ligand (TRAIL) receptor-1 and -2 (see, e.g., Schulze-Osthoff K, et.al., Eur J Biochem 254(3):439-59 (1998), which is hereby incorporated by reference). Moreover, in another preferred embodiment of the present invention, said polypeptides may induce apoptosis through other mechanisms, such as in the activation of other proteins which will activate apoptosis, or through stimulating the expression of said proteins, either alone or in combination with small molecule drugs or adjuvants, such as apoptonin, galectins, thioredoxins, antiinflammatory proteins (See for example, Mutat. Res. 400(1-2):447-55 (1998), Med Hypotheses.50(5):423-33 (1998), Chem. Biol. Interact. Apr 24;111-112:23-34 (1998), J. Mo. Med. 76(6):402-12 (1998), Int. J. Tissue React. 20(1):3-15 (1998), which are all hereby incorporated by reference).

[0604] Polypeptides, including protein fusions to, or fragments thereof, of the present invention are useful in inhibiting the metastasis of proliferative cells or tissues. Inhibition may occur as a direct result of administering polypeptides, or antibodies directed to said polypeptides as described elsewhere herein, or indirectly, such as activating the expression of proteins known to inhibit metastasis, for example alpha 4 integrins, (See, e.g., Curr Top Microbiol Immunol 1998;231:125-41, which is hereby incorporated by reference). Such therapeutic affects of the present invention may be achieved either alone, or in combination with small molecule drugs or adjuvants.

[0605] In another embodiment, the invention provides a method of delivering compositions containing the polypeptides of the invention (e.g., compositions containing polypeptides or anti-liver antigen polypeptide antibodies associated with heterologous polypeptides, heterologous nucleic acids, toxins, or prodrugs) to targeted cells expressing the polypeptide of the present invention. Liver antigen polypeptides or anti-liver antigen polypeptide antibodies of the invention may be associated with heterologous polypeptides, heterologous nucleic acids, toxins, or prodrugs via hydrophobic, hydrophilic, ionic and/or covalent interactions.

[0606] Polypeptides, protein fusions to, or fragments thereof, of the present invention are useful in enhancing the immunogenicity and/or antigenicity of proliferating cells or tissues, either directly, such as would occur if the polypeptides of the present invention ‘vaccinated’ the immune response to respond to proliferative antigens and immunogens, or indirectly, such as in activating the expression of proteins known to enhance the immune response (e.g. chemokines), to said antigens and immunogens.

### Urinary System Disorders

[0607] Polynucleotides, polypeptides, antibodies, and/or agonists or antagonists of the present invention, may be used to treat, prevent, diagnose, and/or prognose disorders of the urinary system, including but not limited to disorders of the renal system, bladder, ureters, and urethra. Renal disorders include, but are not limited to, kidney failure, nephritis, blood vessel disorders of kidney, metabolic and congenital kidney disorders, urinary disorders of the kidney, autoimmune disorders, sclerosis and necrosis, electrolyte imbalance, and kidney cancers.

[0608] Kidney failure diseases include, but are not limited to, acute kidney failure, chronic kidney failure, atheroembolic renal failure, and end-stage renal disease. Inflammatory diseases of the kidney include acute glomerulonephritis, postinfectious glomerulonephritis, rapidly progressive glomerulonephritis, nephrotic syndrome, membranous glomerulonephritis, familial nephrotic syndrome, membranoproliferative glomerulonephritis I and II, mesangial proliferative glomerulonephritis, chronic glomerulonephritis, acute tubulointerstitial nephritis, chronic tubulointerstitial nephritis, acute post-streptococcal glomerulonephritis (PSGN), pyelonephritis, lupus nephritis, chronic nephritis, interstitial nephritis, and post-streptococcal glomerulonephritis.

[0609] Blood vessel disorders of the kidneys include, but are not limited to, kidney infarction, atheroembolic kidney disease, cortical necrosis, malignant nephrosclerosis, renal vein thrombosis, renal underperfusion, renal ischemia-reperfusion, renal artery embolism, and renal artery stenosis. Kidney disorders resulting form urinary tract problems include, but are not limited to, pyelonephritis, hydronephrosis, urolithiasis (renal lithiasis, nephrolithiasis), reflux nephropathy, urinary tract infections, urinary retention, and acute or chronic unilateral obstructive uropathy.

[0610] Metabolic and congenital disorders of the kidneys include, but are not limited to, renal tubular acidosis, renal glycosuria, nephrogenic diabetes insipidus, cystinuria, Fanconi's syndrome, vitamin D-resistant rickets, Hartnup disease, Bartter's syndrome, Liddle's syndrome, polycystic kidney disease, medullary cystic disease, medullary sponge kidney, Alport's syndrome, nail-patella syndrome, congenital nephotic syndrome, CRUSH syndrome, horseshoe kidney, diabetic nephropathy, nephrogenic diabetes insipidus, analgesic nephropathy, kidney stones, and membranous nephropathy, Kidney disorders resulting from an autoimmune response include, but are not limited to, systemic lupus erythematosus (SLE), Goodpasture syndrome, IgA nephropathy, and IgM mesangial proliferative glomerulonephritis.

[0611] Sclerotic or necrotic disorders of the kidney include, but are not limited to, glomerulosclerosis, diabetic nephropathy, focal segmental glomerulosclerosis (FSGS), nectrotizing glomerulonephritis, and renal papillary necrosis. Kidneys may also develop carcinomas, including, but not limited to, hypernephroma, nephroblastoma, renal cell cancer, transitional cell cancer, squamous cell cancer, and Wilm's tumor.

[0612] Kidney disorders may also result in electrolyte imbalances, including, but not limited to, nephrocalcinosis, pyuria, edema, hydronephritis, proteinuria, hyponatremia, hypernatremia, hypokalemia, hyperkalemia, hypocalcemia, hypercalcemia, hypophosphatemia, and hyperphosphatemia.

[0613] Bladder disorders include, but are not limited to, benign prostatic hyperplasia (BPH), interstitial cystitis (IC), prostatitis, proteinuria, urinary tract infections, urinary incontinence, urinary retention. Disorders of the ureters and urethra include, but are not limited to, acute or chronic unilateral obstructive uropathy. The bladder, ureters, and urethra may also develop carcinomas, including, but not limited to, superficial bladder cancer, invasive bladder cancer, carcinoma of the ureter, and urethra cancers.

[0614] Polypeptides may be administered using any method known in the art, including, but not limited to, direct needle injection at the delivery site, intravenous injection, topical administration, catheter infusion, biolistic injectors, particle accelerators, gelfoam sponge depots, other commercially available depot materials, osmotic pumps, oral or suppositorial solid pharmaceutical formulations, decanting or topical applications during surgery, aerosol delivery. Such methods are known in the art. Polypeptides may be administered as part of a Therapeutic, described in more detail below. Methods of delivering polynucleotides are described in more detail herein.

### Cardiovascular Disorders

[0615] Polynucleotides or polypeptides, or agonists or antagonists of the present invention, may be used to treat, prevent, diagnose, and/or prognose cardiovascular disorders, including, but not limited to, peripheral artery disease, such as limb ischemia.

[0616] Cardiovascular disorders include cardiovascular abnormalities, such as arterio-arterial fistula, arteriovenous fistula, cerebral arteriovenous malformations, congenital heart defects, pulmonary atresia, and Scimitar Syndrome. Congenital heart defects include aortic coarctation, cor triatriatum, coronary vessel anomalies, crisscross heart, dextrocardia, patent ductus arteriosus, Ebstein's anomaly, Eisenmenger complex, hypoplastic left heart syndrome, levocardia, tetralogy of fallot, transposition of great vessels, double outlet right ventricle, tricuspid atresia, persistent truncus arteriosus, total anomalous pulmonary venous connection, hypoplastic left heart syndrome, and heart septal defects, such as aortopulmonary septal defect, endocardial cushion defects, Lutembacher's Syndrome, atrioventricular canal defect, trilogy of Fallot, ventricular heart septal defects.

[0617] Cardiovascular disorders also include heart disease, such as arrhythmias, carcinoid heart disease, high cardiac output, low cardiac output, cardiac tamponade, endocarditis (including bacterial), heart aneurysm, cardiac arrest, sudden cardiac death, congestive heart failure, congestive cardiomyopathy, paroxysmal dyspnea, cardiac edema, heart hypertrophy, congestive cardiomyopathy, left ventricular hypertrophy, right ventricular hypertrophy, post-infarction heart rupture, ventricular septal rupture, heart valve diseases, myocardial diseases, myocardial ischemia, pericardial effusion, pericarditis (including constrictive and tuberculous), pneumopericardium, postpericardiotomy syndrome, pulmonary heart disease, rheumatic heart disease, ventricular dysfunction, hyperemia, cardiovascular pregnancy complications, Scimitar Syndrome, diastolic dysfunction, enlarged heart, heart block, J-curve phenomenon, rheumatic heart disease, Marfan syndrome, cardiovascular syphilis, and cardiovascular tuberculosis.

[0618] Arrhythmias include sinus arrhythmia, atrial fibrillation, atrial flutter, bradycardia, extrasystole, Adams-Stokes Syndrome, bundle-branch block, sinoatrial block, long QT syndrome, parasystole, Lown-Ganong-Levine Syndrome, Mahaim-type pre-excitation syndrome, Wolff-Parkinson-White syndrome, sick sinus syndrome, tachycardias, and ventricular fibrillation. Tachycardias include paroxysmal tachycardia, supraventricular tachycardia, accelerated idioventricular rhythm, atrioventricular nodal reentry tachycardia, ectopic atrial tachycardia, ectopic junctional tachycardia, sinoatrial nodal reentry tachycardia, sinus tachycardia, Torsades de Pointes, and ventricular tachycardia.

[0619] Heart valve disease include aortic valve insufficiency, aortic valve stenosis, heart murmurs, aortic valve prolapse, mitral valve prolapse, tricuspid valve prolapse, mitral valve insufficiency, mitral valve stenosis, pulmonary atresia, pulmonary valve insufficiency, pulmonary valve stenosis, tricuspid atresia, tricuspid valve insufficiency, tricuspid valve stenosis, and bicuspid aortic valve.

[0620] Myocardial diseases include alcoholic cardiomyopathy, congestive cardiomyopathy, hypertrophic cardiomyopathy, aortic subvalvular stenosis, pulmonary subvalvular stenosis, restrictive cardiomyopathy, Chagas cardiomyopathy, endocardial fibroelastosis, endomyocardial fibrosis, Kearns Syndrome, Barth syndrome, myocardial reperfusion injury, and myocarditis.

[0621] Myocardial ischemias include coronary disease, such as angina pectoris, Prinzmetal's angina, unstable angina, coronary aneurysm, coronary arteriosclerosis, coronary thrombosis, coronary vasospasm, myocardial infarction and myocardial stunning.

[0622] Cardiovascular diseases also include vascular diseases such as aneurysms, angiodysplasia, angiomatosis, bacillary angiomatosis, Hippel-Lindau Disease, Klippel-Trenaunay-Weber Syndrome, Sturge-Weber Syndrome, angioneurotic edema, aortic diseases, Takayasu's Arteritis, aortitis, Leriche's Syndrome, arterial occlusive diseases, arteritis, enarteritis, polyarteritis nodosa, cerebrovascular disorders, diabetic angiopathies, diabetic retinopathy, embolisms, thrombosis, erythromelalgia, hemorrhoids, hepatic veno-occlusive disease, hypertension, hypotension (shock), ischemia, peripheral vascular diseases, phlebitis, superficial phlebitis, pulmonary veno-occlusive disease, chronic obstructive pulmonary disease, Buerger's disease, Raynaud's disease, CREST syndrome, retinal vein occlusion, Scimitar syndrome, superior vena cava syndrome, telangiectasia, atacia telangiectasia, hereditary hemorrhagic telangiectasia, deep vein thrombosis, varicocele, varicose veins, varicose ulcer, vasculitis, and venous insufficiency.

[0623] Aneurysms include dissecting aneurysms, false aneurysms, infected aneurysms, ruptured aneurysms, aortic aneurysms, cerebral aneurysms, coronary aneurysms, heart aneurysms, and iliac aneurysms.

[0624] Arterial occlusive diseases include arteriosclerosis, arteriolosclerosis, atherosclerosis, intermittent claudication, carotid stenosis, fibromuscular dysplasias, mesenteric vascular occlusion, Moyamoya disease, renal artery obstruction, retinal artery occlusion, and thromboangiitis obliterans.

[0625] Cerebrovascular disorders include carotid artery diseases, cerebral amyloid angiopathy, cerebral aneurysm, cerebral anoxia, cerebral arteriosclerosis, cerebral arteriovenous malformation, cerebral artery diseases, cerebral embolism and thrombosis, carotid artery thrombosis, sinus thrombosis, Wallenberg's syndrome, cerebral hemorrhage, epidural hematoma, subdural hematoma, subaraxhnoid hemorrhage, cerebral infarction, cerebral ischemia (including transient), subclavian steal syndrome, periventricular leukomalacia, vascular headache, cluster headache, migraine, and vertebrobasilar insufficiency.

[0626] Embolisms include air embolisms, amniotic fluid embolisms, cholesterol embolisms, blue toe syndrome, fat embolisms, pulmonary embolisms, and thromoboembolisms. Thrombosis include coronary thrombosis, hepatic vein thrombosis, deep vein thrombosis, retinal vein occlusion, carotid artery thrombosis, sinus thrombosis, Wallenberg's syndrome, and thrombophlebitis.

[0627] Ischemia includes cerebral ischemia, ischemic colitis, silent ischemia, compartment syndromes, anterior compartment syndrome, myocardial ischemia, reperfusion injuries, and peripheral limb ischemia. Vasculitis includes aortitis, arteritis, Behcet's Syndrome, Churg-Strauss Syndrome, mucocutaneous lymph node syndrome, thromboangiitis obliterans, hypersensitivity vasculitis, Schoenlein-Henoch purpura, allergic cutaneous vasculitis, and Wegener's granulomatosis.

[0628] Cardiovascular diseases can also occur due to electrolyte imbalances that include, but are not limited to hyponatremia, hypernatremia, hypokalemia, hyperkalemia, hypocalcemia, hypercalcemia, hypophosphatemia, and hyperphophatemia. Neoplasm and/or cancers of the cardiovascular system include, but are not limited to, myxomas, fibromas, and rhabdomyomas.

[0629] Polypeptides may be administered using any method known in the art, including, but not limited to, direct needle injection at the delivery site, intravenous injection, topical administration, catheter infusion, biolistic injectors, particle accelerators, gelfoam sponge depots, other commercially available depot materials, osmotic pumps, oral or suppositorial solid pharmaceutical formulations, decanting or topical applications during surgery, aerosol delivery. Such methods are known in the art. Polypeptides may be administered as part of a Therapeutic, described in more detail below. Methods of delivering polynucleotides are described in more detail herein.

### Respiratory Disorders

[0630] Polynucleotides or polypeptides, or agonists or antagonists of the present invention may be used to treat, prevent, diagnose, and/or prognose diseases and/or disorders of the respiratory system.

[0631] Diseases and disorders of the respiratory system include, but are not limited to, nasal vestibulitis, nonallergic rhinitis (e.g., acute rhinitis, chronic rhinitis, atrophic rhinitis, vasomotor rhinitis), nasal polyps, and sinusitis, juvenile angiofibromas, cancer of the nose and juvenile papillomas, vocal cord polyps, nodules (singer's nodules), contact ulcers, vocal cord paralysis, laryngoceles, pharyngitis (e.g., viral and bacterial), tonsillitis, tonsillar cellulitis, parapharyngeal abscess, laryngitis, laryngoceles, and throat cancers (e.g., cancer of the nasopharynx, tonsil cancer, larynx cancer), lung cancer (e.g., squamous cell carcinoma, small cell (oat cell) carcinoma, large cell carcinoma, and adenocarcinoma), allergic disorders (eosinophilic pneumonia, hypersensitivity pneumonitis (e.g., extrinsic allergic alveolitis, allergic interstitial pneumonitis, organic dust pneumoconiosis, allergic bronchopulmonary aspergillosis, asthma, Wegener's granulomatosis (granulomatous vasculitis), Goodpasture's syndrome)), pneumonia (e.g., bacterial pneumonia (e.g., Streptococcus pneumoniae (pneumoncoccal pneumonia), Staphylococcus aureus (staphylococcal pneumonia), Gram-negative bacterial pneumonia (caused by, e.g., Klebsiella and Pseudomas spp.), Mycoplasma pneumoniae pneumonia, Hemophilus influenzae pneumonia, Legionella pneumophila (Legionnaires' disease), and Chlamydia psittaci (Psittacosis)), and viral pneumonia (e.g., influenza, chickenpox (varicella).

[0632] Additional diseases and disorders of the respiratory system include, but are not limited to bronchiolitis, polio (poliomyelitis), croup, respiratory syncytial viral infection, mumps, erythema infectiosum (fifth disease), roseola infantum, progressive rubella panencephalitis, german measles, and subacute sclerosing panencephalitis), fungal pneumonia (e.g., Histoplasmosis, Coccidioidomycosis, Blastomycosis, fungal infections in people with severely suppressed immune systems (e.g., cryptococcosis, caused by Cryptococcus neoformans; aspergillosis, caused by Aspergillus spp.; candidiasis, caused by Candida; and mucormycosis)), Pneumocystis carinii (pneumocystis pneumonia), atypical pneumonias (e.g., Mycoplasma and Chlamydia spp.), opportunistic infection pneumonia, nosocomial pneumonia, chemical pneumonitis, and aspiration pneumonia, pleural disorders (e.g., pleurisy, pleural effusion, and pneumothorax (e.g., simple spontaneous pneumothorax, complicated spontaneous pneumothorax, tension pneumothorax)), obstructive airway diseases (e.g., asthma, chronic obstructive pulmonary disease (COPD), emphysema, chronic or acute bronchitis), occupational lung diseases (e.g., silicosis, black lung (coal workers' pneumoconiosis), asbestosis, berylliosis, occupational asthsma, byssinosis, and benign pneumoconioses), Infiltrative Lung Disease (e.g., pulmonary fibrosis (e.g., fibrosing alveolitis, usual interstitial pneumonia), idiopathic pulmonary fibrosis, desquamative interstitial pneumonia, lymphoid interstitial pneumonia, histiocytosis X (e.g., Letterer-Siwe disease, Hand-Schüller-Christian disease, eosinophilic granuloma), idiopathic pulmonary hemosiderosis, sarcoidosis and pulmonary alveolar proteinosis), Acute respiratory distress syndrome (also called, e.g., adult respiratory distress syndrome), edema, pulmonary embolism, bronchitis (e.g., viral, bacterial), bronchiectasis, atelectasis, lung abscess (caused by, e.g., Staphylococcus aureus or Legionella pneumophila), and cystic fibrosis.

### Anti-Angiogenesis Activity

[0633] The naturally occurring balance between endogenous stimulators and inhibitors of angiogenesis is one in which inhibitory influences predominate. Rastinejad et al., Cell 56:345-355 (1989). In those rare instances in which neovascularization occurs under normal physiological conditions, such as wound healing, organ regeneration, embryonic development, and female reproductive processes, angiogenesis is stringently regulated and spatially and temporally delimited. Under conditions of pathological angiogenesis such as that characterizing solid tumor growth, these regulatory controls fail. Unregulated angiogenesis becomes pathologic and sustains progression of many neoplastic and non-neoplastic diseases. A number of serious diseases are dominated by abnormal neovascularization including solid tumor growth and metastases, arthritis, some types of eye disorders, and psoriasis. See, e.g., reviews by Moses et al., Biotech. 9:630-634 (1991); Folkman et al., N. Engl. J. Med., 333:1757-1763 (1995); Auerbach et al., J. Microvasc. Res. 29:401-411 (1985); Folkman, Advances in Cancer Research, eds. Klein and Weinhouse, Academic Press, New York, pp. 175-203 (1985); Patz, Am. J. Opthalmol. 94:715-743 (1982); and Folkman et al., Science 221:719-725 (1983). In a number of pathological conditions, the process of angiogenesis contributes to the disease state. For example, significant data have accumulated which suggest that the growth of solid tumors is dependent on angiogenesis. Folkman and Klagsbrun, Science 235:442-447 (1987).

[0634] The present invention provides for treatment of diseases or disorders associated with neovascularization by administration of the polynucleotides and/or polypeptides of the invention, as well as agonists or antagonists of the present invention. Malignant and metastatic conditions which can be treated with the polynucleotides and polypeptides, or agonists or antagonists of the invention include, but are not limited to, malignancies, solid tumors, and cancers described herein and otherwise known in the art (for a review of such disorders, see Fishman et al., Medicine, 2d Ed., J. B. Lippincott Co., Philadelphia (1985)). Thus, the present invention provides a method of treating an angiogenesis-related disease and/or disorder, comprising administration to an individual in need thereof a therapeutically effective amount of a polynucleotide, polypeptide, antagonist and/or agonist of the invention. For example, polynucleotides, polypeptides, antagonists and/or agonists may be utilized in a variety of additional methods in order to therapeutically treat a cancer or tumor. Cancers which may be treated with polynucleotides, polypeptides, antagonists and/or agonists include, but are not limited to solid tumors, including prostate, lung, breast, ovarian, stomach, pancreas, larynx, esophagus, testes, liver, parotid, biliary tract, colon, rectum, cervix, uterus, endometrium, kidney, bladder, thyroid cancer; primary tumors and metastases; melanomas; glioblastoma; Kaposi's sarcoma; leiomyosarcoma; non- small cell lung cancer; colorectal cancer; advanced malignancies; and blood born tumors such as leukemias. For example, polynucleotides, polypeptides, antagonists and/or agonists may be delivered topically, in order to treat cancers such as skin cancer, head and neck tumors, breast tumors, and Kaposi's sarcoma.

[0635] Within yet other aspects, polynucleotides, polypeptides, antagonists and/or agonists may be utilized to treat superficial forms of bladder cancer by, for example, intravesical administration. Polynucleotides, polypeptides, antagonists and/or agonists may be delivered directly into the tumor, or near the tumor site, via injection or a catheter. Of course, as the artisan of ordinary skill will appreciate, the appropriate mode of administration will vary according to the cancer to be treated. Other modes of delivery are discussed herein.

[0636] Polynucleotides, polypeptides, antagonists and/or agonists may be useful in treating other disorders, besides cancers, which involve angiogenesis. These disorders include, but are not limited to: benign tumors, for example hemangiomas, acoustic neuromas, neurofibromas, trachomas, and pyogenic granulomas; artheroscleric plaques; ocular angiogenic diseases, for example, diabetic retinopathy, retinopathy of prematurity, macular degeneration, corneal graft rejection, neovascular glaucoma, retrolental fibroplasia, rubeosis, retinoblastoma, uvietis and Pterygia (abnormal blood vessel growth) of the eye; rheumatoid arthritis; psoriasis; delayed wound healing; endometriosis; vasculogenesis; granulations; hypertrophic scars (keloids); nonunion fractures; scleroderma; trachoma; vascular adhesions; myocardial angiogenesis; coronary collaterals; cerebral collaterals; arteriovenous malformations; ischemic limb angiogenesis; Osler-Webber Syndrome; plaque neovascularization; telangiectasia; hemophiliac joints; angiofibroma; fibromuscular dysplasia; wound granulation; Crohn's disease; and atherosclerosis.

[0637] For example, within one aspect of the present invention methods are provided for treating hypertrophic scars and keloids, comprising the step of administering a polynucleotide, polypeptide, antagonist and/or agonist of the invention to a hypertrophic scar or keloid.

[0638] Within one embodiment of the present invention polynucleotides, polypeptides, antagonists and/or agonists of the invention are directly injected into a hypertrophic scar or keloid, in order to prevent the progression of these lesions. This therapy is of particular value in the prophylactic treatment of conditions which are known to result in the development of hypertrophic scars and keloids (e.g., bums), and is preferably initiated after the proliferative phase has had time to progress (approximately 14 days after the initial injury), but before hypertrophic scar or keloid development. As noted above, the present invention also provides methods for treating neovascular diseases of the eye, including for example, corneal neovascularization, neovascular glaucoma, proliferative diabetic retinopathy, retrolental fibroplasia and macular degeneration.

[0639] Moreover, ocular disorders associated with neovascularization which can be treated with the polynucleotides and polypeptides of the present invention (including agonists and/or antagonists) include, but are not limited to: neovascular glaucoma, diabetic retinopathy, retinoblastoma, retrolental fibroplasia, uveitis, retinopathy of prematurity macular degeneration, corneal graft neovascularization, as well as other eye inflammatory diseases, ocular tumors and diseases associated with choroidal or iris neovascularization. See, e.g., reviews by Waltman et al., Am. J. Ophthal. 85:704-710 (1978) and Gartner et al., Surv. Ophthal. 22:291-312 (1978).

[0640] Thus, within one aspect of the present invention methods are provided for treating neovascular diseases of the eye such as corneal neovascularization (including corneal graft neovascularization), comprising the step of administering to a patient a therapeutically effective amount of a compound (as described above) to the cornea, such that the formation of blood vessels is inhibited. Briefly, the cornea is a tissue, which normally lacks blood vessels. In certain pathological conditions however, capillaries may extend into the cornea from the pericorneal vascular plexus of the limbus. When the cornea becomes vascularized, it also becomes clouded, resulting in a decline in the patient's visual acuity. Visual loss may become complete if the cornea completely opacitates. A wide variety of disorders can result in corneal neovascularization, including for example, corneal infections (e.g., trachoma, herpes simplex keratitis, leishmaniasis and onchocerciasis), immunological processes (e.g., graft rejection and Stevens-Johnson's syndrome), alkali bums, trauma, inflammation (of any cause), toxic and nutritional deficiency states, and as a complication of wearing contact lenses.

[0641] Within particularly preferred embodiments of the invention, may be prepared for topical administration in saline (combined with any of the preservatives and antimicrobial agents commonly used in ocular preparations), and administered in eyedrop form. The solution or suspension may be prepared in its pure form and administered several times daily. Alternatively, anti-angiogenic compositions, prepared as described above, may also be administered directly to the cornea. Within preferred embodiments, the anti-angiogenic composition is prepared with a muco-adhesive polymer, which binds to cornea. Within further embodiments, the anti-angiogenic factors or anti-angiogenic compositions may be utilized as an adjunct to conventional steroid therapy. Topical therapy may also be useful prophylactically in corneal lesions which are known to have a high probability of inducing an angiogenic response (such as chemical burns). In these instances the treatment, likely in combination with steroids, may be instituted immediately to help prevent subsequent complications.

[0642] Within other embodiments, the compounds described above may be injected directly into the corneal stroma by an ophthalmologist under microscopic guidance. The preferred site of injection may vary with the morphology of the individual lesion, but the goal of the administration would be to place the composition at the advancing front of the vasculature (i.e., interspersed between the blood vessels and the normal cornea). In most cases this would involve perilimbic corneal injection to “protect” the cornea from the advancing blood vessels. This method may also be utilized shortly after a corneal insult in order to prophylactically prevent corneal neovascularization. In this situation, the material could be injected in the perilimbic cornea interspersed between the corneal lesion and its undesired potential limbic blood supply. Such methods may also be utilized in a similar fashion to prevent capillary invasion of transplanted corneas. In a sustained-release form, injections might only be required 2-3 times per year. A steroid could also be added to the injection solution to reduce inflammation resulting from the injection itself.

[0643] Within another aspect of the present invention, methods are provided for treating neovascular glaucoma, comprising the step of administering to a patient a therapeutically effective amount of a polynucleotide, polypeptide, antagonist and/or agonist to the eye, such that the formation of blood vessels is inhibited. In one embodiment, the compound may be administered topically to the eye in order to treat early forms of neovascular glaucoma. Within other embodiments, the compound may be implanted by injection into the region of the anterior chamber angle. Within other embodiments, the compound may also be placed in any location such that the compound is continuously released into the aqueous humor. Within another aspect of the present invention, methods are provided for treating proliferative diabetic retinopathy, comprising the step of administering to a patient a therapeutically effective amount of a polynucleotide, polypeptide, antagonist and/or agonist to the eyes, such that the formation of blood vessels is inhibited.

[0644] Within particularly preferred embodiments of the invention, proliferative diabetic retinopathy may be treated by injection into the aqueous humor or the vitreous, in order to increase the local concentration of the polynucleotide, polypeptide, antagonist and/or agonist in the retina. Preferably, this treatment should be initiated prior to the acquisition of severe disease requiring photocoagulation.

[0645] Within another aspect of the present invention, methods are provided for treating retrolental fibroplasia, comprising the step of administering to a patient a therapeutically effective amount of a polynucleotide, polypeptide, antagonist and/or agonist to the eye, such that the formation of blood vessels is inhibited. The compound may be administered topically, via intravitreous injection and/or via intraocular implants.

[0646] Additionally, disorders which can be treated with the polynucleotides, polypeptides, agonists and/or agonists include, but are not limited to, hemangioma, arthritis, psoriasis, angiofibroma, atherosclerotic plaques, delayed wound healing, granulations, hemophilic joints, hypertrophic scars, nonunion fractures, Osler-Weber syndrome, pyogenic granuloma, scleroderma, trachoma, and vascular adhesions.

[0647] Moreover, disorders and/or states, which can be treated, prevented, diagnosed and/or prognosed with the polynucleotides, polypeptides, agonists and/or agonists of the invention include, but are not limited to, solid tumors, blood born tumors such as leukemias, tumor metastasis, Kaposi's sarcoma, benign tumors, for example hemangiomas, acoustic neuromas, neurofibromas, trachomas, and pyogenic granulomas, rheumatoid arthritis, psoriasis, ocular angiogenic diseases, for example, diabetic retinopathy, retinopathy of prematurity, macular degeneration, corneal graft rejection, neovascular glaucoma, retrolental fibroplasia, rubeosis, retinoblastoma, and uvietis, delayed wound healing, endometriosis, vascluogenesis, granulations, hypertrophic scars (keloids), nonunion fractures, scleroderma, trachoma, vascular adhesions, myocardial angiogenesis, coronary collaterals, cerebral collaterals, arteriovenous malformations, ischemic limb angiogenesis, Osler-Webber Syndrome, plaque neovascularization, telangiectasia, hemophiliac joints, angiofibroma fibromuscular dysplasia, wound granulation, Crohn's disease, atherosclerosis, birth control agent by preventing vascularization required for embryo implantation controlling menstruation, diseases that have angiogenesis as a pathologic consequence such as cat scratch disease (Rochele minalia quintosa), ulcers (Helicobacter pylori), Bartonellosis and bacillary angiomatosis.

[0648] In one aspect of the birth control method, an amount of the compound sufficient to block embryo implantation is administered before or after intercourse and fertilization have occurred, thus providing an effective method of birth control, possibly a “morning after” method. Polynucleotides, polypeptides, agonists and/or agonists may also be used in controlling menstruation or administered as either a peritoneal lavage fluid or for peritoneal implantation in the treatment of endometriosis.

[0649] Polynucleotides, polypeptides, agonists and/or agonists of the present invention may be incorporated into surgical sutures in order to prevent stitch granulomas.

[0650] Polynucleotides, polypeptides, agonists and/or agonists may be utilized in a wide variety of surgical procedures. For example, within one aspect of the present invention a compositions (in the form of, for example, a spray or film) may be utilized to coat or spray an area prior to removal of a tumor, in order to isolate normal surrounding tissues from malignant tissue, and/or to prevent the spread of disease to surrounding tissues. Within other aspects of the present invention, compositions (e.g., in the form of a spray) may be delivered via endoscopic procedures in order to coat tumors, or inhibit angiogenesis in a desired locale. Within yet other aspects of the present invention, surgical meshes, which have been coated with anti-angiogenic compositions of the present invention may be utilized in any procedure wherein a surgical mesh might be utilized. For example, within one embodiment of the invention a surgical mesh laden with an anti-angiogenic composition may be utilized during abdominal cancer resection surgery (e.g., subsequent to colon resection) in order to provide support to the structure, and to release an amount of the anti-angiogenic factor.

[0651] Within further aspects of the present invention, methods are provided for treating tumor excision sites, comprising administering a polynucleotide, polypeptide, agonist and/or agonist to the resection margins of a tumor subsequent to excision, such that the local recurrence of cancer and the formation of new blood vessels at the site is inhibited. Within one embodiment of the invention, the anti-angiogenic compound is administered directly to the tumor excision site (e.g., applied by swabbing, brushing or otherwise coating the resection margins of the tumor with the anti-angiogenic compound). Alternatively, the anti-angiogenic compounds may be incorporated into known surgical pastes prior to administration. Within particularly preferred embodiments of the invention, the anti-angiogenic compounds are applied after hepatic resections for malignancy, and after neurosurgical operations.

[0652] Within one aspect of the present invention, polynucleotides, polypeptides, agonists and/or agonists may be administered to the resection margin of a wide variety of tumors, including for example, breast, colon, brain and hepatic tumors. For example, within one embodiment of the invention, anti-angiogenic compounds may be administered to the site of a neurological tumor subsequent to excision, such that the formation of new blood vessels at the site are inhibited.

[0653] The polynucleotides, polypeptides, agonists and/or agonists of the present invention may also be administered along with other anti-angiogenic factors. Representative examples of other anti-angiogenic factors include: Anti-Invasive Factor, retinoic acid and derivatives thereof, paclitaxel, Suramin, Tissue Inhibitor of Metalloproteinase-1, Tissue Inhibitor of Metalloproteinase-2, Plasminogen Activator Inhibitor-1, Plasminogen Activator Inhibitor-2, and various forms of the lighter “d group” transition metals.

[0654] Lighter “d group” transition metals include, for example, vanadium, molybdenum, tungsten, titanium, niobium, and tantalum species. Such transition metal species may form transition metal complexes. Suitable complexes of the above-mentioned transition metal species include oxo transition metal complexes.

[0655] Representative examples of vanadium complexes include oxo vanadium complexes such as vanadate and vanadyl complexes. Suitable vanadate complexes include metavanadate and orthovanadate complexes such as, for example, ammonium metavanadate, sodium metavanadate, and sodium orthovanadate. Suitable vanadyl complexes include, for example, vanadyl acetylacetonate and vanadyl sulfate including vanadyl sulfate hydrates such as vanadyl sulfate mono- and trihydrates.

[0656] Representative examples of tungsten and molybdenum complexes also include oxo complexes. Suitable oxo tungsten complexes include tungstate and tungsten oxide complexes. Suitable tungstate complexes include ammonium tungstate, calcium tungstate, sodium tungstate dihydrate, and tungstic acid. Suitable tungsten oxides include tungsten (IV) oxide and tungsten (VI) oxide. Suitable oxo molybdenum complexes include molybdate, molybdenum oxide, and molybdenyl complexes. Suitable molybdate complexes include ammonium molybdate and its hydrates, sodium molybdate and its hydrates, and potassium molybdate and its hydrates. Suitable molybdenum oxides include molybdenum (VI) oxide, molybdenum (VI) oxide, and molybdic acid. Suitable molybdenyl complexes include, for example, molybdenyl acetylacetonate. Other suitable tungsten and molybdenum complexes include hydroxo derivatives derived from, for example, glycerol, tartaric acid, and sugars.

[0657] A wide variety of other anti-angiogenic factors may also be utilized within the context of the present invention. Representative examples include platelet factor 4; protamine sulphate; sulphated chitin derivatives (prepared from queen crab shells), (Murata et al., Cancer Res. 51:22-26 (1991)); Sulphated Polysaccharide Peptidoglycan Complex (SP-PG) (the function of this compound may be enhanced by the presence of steroids such as estrogen, and tamoxifen citrate); Staurosporine; modulators of matrix metabolism, including for example, proline analogs, cishydroxyproline, d,L-3,4-dehydroproline, Thiaproline, alpha,alpha-dipyridyl, aminopropionitrile fumarate; 4-propyl-5-(4-pyridinyl)-2(3H)-oxazolone; Methotrexate; Mitoxantrone; Heparin; Interferons; 2 Macroglobulin-serum; ChIMP-3 (Pavloff et al., J. Bio. Chem. 267:17321-17326 (1992)); Chymostatin (Tomkinson et al., Biochem J. 286:475-480 (1992)); Cyclodextrin Tetradecasulfate; Eponemycin; Camptothecin; Fumagillin (Ingber et al., Nature 348:555-557 (1990)); Gold Sodium Thiomalate (“GST”; Matsubara and Ziff, J. Clin. Invest. 79:1440-1446 (1987)); anticollagenase-serum; alpha2-antiplasmin (Holmes et al., J. Biol. Chem. 262(4):1659-1664 (1987)); Bisantrene (National Cancer Institute); Lobenzarit disodium (N-(2)-carboxyphenyl-4-chloroanthronilic acid disodium or “CCA”; Takeuchi et al., Agents Actions 36:312-316, 1992); Thalidomide; Angostatic steroid; AGM-1470; carboxynaminolmidazole; and metalloproteinase inhibitors such as BB94.

### Musculoskeletal System Disorders

[0658] Polynucleotides, polypeptides, antibodies, and/or agonists or antagonists of the present invention, may be used to treat, prevent, diagnose, and/or prognose disorders of the musculoskeletal system, including but not limited to, disorders of the bone, joints, ligaments, tendons, bursa, muscle, and/or neoplasms and cancers associated with musculoskeletal tissue.

[0659] Diseases or disorders of the bone include, but are not limited to, Albers-Schönberg disease, bowlegs, heel spurs, Köhler's bone disease, knock-knees, Legg-Calvé-Perthes disease, Marfan's syndrome, mucopolysaccharidoses, Osgood-Schlatter disease, osteochondroses, osteochondrodysplasia, osteomyelitis, osteopetroses, osteoporosis (postmenopausal, senile, and juvenile), Paget's disease, Scheuermann's disease, scoliosis, Sever's disease, and patellofemoral stress syndrome.

[0660] Joint diseases or disorders include, but are not limited to, ankylosing spondylitis, Behcet's syndrome, CREST syndrome, Ehlers-Danlos syndrome, infectious arthritis, discoid lupus erythematosus, systemic lupus erythematosus, Lyme disease, osteoarthritis, psoriatic arthritis, relapsing polychondrites, Reiter's syndrome, rheumatoid arthritis (adult and juvenile), scleroderma, and Still's disease.

[0661] Diseases or disorders affecting ligaments, tendons, or bursa include, but are not limited to, ankle sprain, bursitis, posterior Achilles tendon bursitis (Haglund's deformity), anterior Achilles tendon bursitis (Albert's disease), tendinitis, tenosynovitis, poplieus tendinitis, Achilles tendinitis, medial or lateral epicondylitis, rotator cuff tendinitis, spasmodic torticollis, and fibromyalgia syndrome.

[0662] Muscle diseases or disorders include, but are not limited to, Becker's muscular dystrophy, Duchenne's muscular dystrophy, Landouzy-Dejerine muscular dystrophy, Leyden-M6bius muscular dystrophy, Erb's muscular dystrophy, Charcot's joints, dermatomyositis, gout, pseudogout, glycogen storage diseases, Pompe's disease, mitochondrial myopathy, periodic paralysis, polymyalgia rheumatica, polymyositis, Steinert's disease, Thomsen's disease, anterolateral and posteromedial shin splints, posterior femoral muscle strain, and fibromyositis.

[0663] Musculoskeletal tissue may also develop cancers and/or neoplasms that include, but are not limited to, osteochondroma, benign chondroma, chondroblastoma, chondromyxoid fibroma, osteoid osteoma, giant cell tumor, multiple myeloma, osteosarcoma, fibrosarcoma, malignant fibrous histiocytoma, chondrosarcoma, Ewing's tumor, and malignant lymphoma of bone.

### Neural Activity and Neurological Diseases

[0664] The polynucleotides, polypeptides and agonists or antagonists of the invention may be used for the diagnosis and/or treatment of diseases, disorders, damage or injury of the brain and/or nervous system. Nervous system disorders that can be treated with the compositions of the invention (e.g., polypeptides, polynucleotides, and/or agonists or antagonists), include, but are not limited to, nervous system injuries, and diseases or disorders which result in either a disconnection of axons, a diminution or degeneration of neurons, or demyelination. Nervous system lesions which may be treated in a patient (including human and non-human mammalian patients) according to the methods of the invention, include but are not limited to, the following lesions of either the central (including spinal cord, brain) or peripheral nervous systems: (1) ischemic lesions, in which a lack of oxygen in a portion of the nervous system results in neuronal injury or death, including cerebral infarction or ischemia, or spinal cord infarction or ischemia; (2) traumatic lesions, including lesions caused by physical injury or associated with surgery, for example, lesions which sever a portion of the nervous system, or compression injuries; (3) malignant lesions, in which a portion of the nervous system is destroyed or injured by malignant tissue which is either a nervous system associated malignancy or a malignancy derived from non-nervous system tissue; (4) infectious lesions, in which a portion of the nervous system is destroyed or injured as a result of infection, for example, by an abscess or associated with infection by human immunodeficiency virus, herpes zoster, or herpes simplex virus or with Lyme disease, tuberculosis, or syphilis; (5) degenerative lesions, in which a portion of the nervous system is destroyed or injured as a result of a degenerative process including but not limited to, degeneration associated with Parkinson's disease, Alzheimer's disease, Huntington's chorea, or amyotrophic lateral sclerosis (ALS); (6) lesions associated with nutritional diseases or disorders, in which a portion of the nervous system is destroyed or injured by a nutritional disorder or disorder of metabolism including, but not limited to, vitamin B12 deficiency, folic acid deficiency, Wemicke disease, tobacco-alcohol amblyopia, Marchiafava-Bignami disease (primary degeneration of the corpus callosum), and alcoholic cerebellar degeneration; (7) neurological lesions associated with systemic diseases including, but not limited to, diabetes (diabetic neuropathy, Bell's palsy), systemic lupus erythematosus, carcinoma, or sarcoidosis; (8) lesions caused by toxic substances including alcohol, lead, or particular neurotoxins; and (9) demyelinated lesions in which a portion of the nervous system is destroyed or injured by a demyelinating disease including, but not limited to, multiple sclerosis, human immunodeficiency virus-associated myelopathy, transverse myelopathy or various etiologies, progressive multifocal leukoencephalopathy, and central pontine myelinolysis.

[0665] In one embodiment, the polypeptides, polynucleotides, or agonists or antagonists of the invention are used to protect neural cells from the damaging effects of hypoxia. In a further preferred embodiment, the polypeptides, polynucleotides, or agonists or antagonists of the invention are used to protect neural cells from the damaging effects of cerebral hypoxia. According to this embodiment, the compositions of the invention are used to treat or prevent neural cell injury associated with cerebral hypoxia. In one non-exclusive aspect of this embodiment, the polypeptides, polynucleotides, or agonists or antagonists of the invention, are used to treat or prevent neural cell injury associated with cerebral ischemia. In another non-exclusive aspect of this embodiment, the polypeptides, polynucleotides, or agonists or antagonists of the invention are used to treat or prevent neural cell injury associated with cerebral infarction.

[0666] In another preferred embodiment, the polypeptides, polynucleotides, or agonists or antagonists of the invention are used to treat or prevent neural cell injury associated with a stroke. In a specific embodiment, the polypeptides, polynucleotides, or agonists or antagonists of the invention are used to treat or prevent cerebral neural cell injury associated with a stroke.

[0667] In another preferred embodiment, the polypeptides, polynucleotides, or agonists or antagonists of the invention are used to treat or prevent neural cell injury associated with a heart attack. In a specific embodiment, the polypeptides, polynucleotides, or agonists or antagonists of the invention are used to treat or prevent cerebral neural cell injury associated with a heart attack.

[0668] The compositions of the invention which are useful for treating or preventing a nervous system disorder may be selected by testing for biological activity in promoting the survival or differentiation of neurons. For example, and not by way of limitation, compositions of the invention which elicit any of the following effects may be useful according to the invention: (1) increased survival time of neurons in culture either in the presence or absence of hypoxia or hypoxic conditions; (2) increased sprouting of neurons in culture or in vivo; (3) increased production of a neuron-associated molecule in culture or in vivo, e.g., choline acetyltransferase or acetylcholinesterase with respect to motor neurons; or (4) decreased symptoms of neuron dysfunction in vivo. Such effects may be measured by any method known in the art. In preferred, non-limiting embodiments, increased survival of neurons may routinely be measured using a method set forth herein or otherwise known in the art, such as, for example, in Zhang et al., Proc Natl Acad Sci USA 97:3637-42 (2000) or in Arakawa et al., J. Neurosci., 10:3507-15 (1990); increased sprouting of neurons may be detected by methods known in the art, such as, for example, the methods set forth in Pestronk et al., Exp. Neurol., 70:65-82 (1980), or Brown et al., Ann. Rev. Neurosci., 4:17-42 (1981); increased production of neuron-associated molecules may be measured by bioassay, enzymatic assay, antibody binding, Northern blot assay, etc., using techniques known in the art and depending on the molecule to be measured; and motor neuron dysfunction may be measured by assessing the physical manifestation of motor neuron disorder, e.g., weakness, motor neuron conduction velocity, or functional disability.

[0669] In specific embodiments, motor neuron disorders that may be treated according to the invention include, but are not limited to, disorders such as infarction, infection, exposure to toxin, trauma, surgical damage, degenerative disease or malignancy that may affect motor neurons as well as other components of the nervous system, as well as disorders that selectively affect neurons such as amyotrophic lateral sclerosis, and including, but not limited to, progressive spinal muscular atrophy, progressive bulbar palsy, primary lateral sclerosis, infantile and juvenile muscular atrophy, progressive bulbar paralysis of childhood (Fazio-Londe syndrome), poliomyelitis and the post polio syndrome, and Hereditary Motorsensory Neuropathy (Charcot-Marie-Tooth Disease).

[0670] Further, polypeptides or polynucleotides of the invention may play a role in neuronal survival; synapse formation; conductance; neural differentiation, etc. Thus, compositions of the invention (including polynucleotides, polypeptides, and agonists or antagonists) may be used to diagnose and/or treat or prevent diseases or disorders associated with these roles, including, but not limited to, learning and/or cognition disorders. The compositions of the invention may also be useful in the treatment or prevention of neurodegenerative disease states and/or behavioural disorders. Such neurodegenerative disease states and/or behavioral disorders include, but are not limited to, Alzheimer's Disease, Parkinson's Disease, Huntington's Disease, Tourette Syndrome, schizophrenia, mania, dementia, paranoia, obsessive compulsive disorder, panic disorder, learning disabilities, ALS, psychoses, autism, and altered behaviors, including disorders in feeding, sleep patterns, balance, and perception. In addition, compositions of the invention may also play a role in the treatment, prevention and/or detection of developmental disorders associated with the developing embryo, or sexually-linked disorders.

[0671] Additionally, polypeptides, polynucleotides and/or agonists or antagonists of the invention, may be useful in protecting neural cells from diseases, damage, disorders, or injury, associated with cerebrovascular disorders including, but not limited to, carotid artery diseases (e.g., carotid artery thrombosis, carotid stenosis, or Moyamoya Disease), cerebral amyloid angiopathy, cerebral aneurysm, cerebral anoxia, cerebral arteriosclerosis, cerebral arteriovenous malformations, cerebral artery diseases, cerebral embolism and thrombosis (e.g., carotid artery thrombosis, sinus thrombosis, or Wallenberg's Syndrome), cerebral hemorrhage (e.g., epidural or subdural hematoma, or subarachnoid hemorrhage), cerebral infarction, cerebral ischemia (e.g., transient cerebral ischemia, Subclavian Steal Syndrome, or vertebrobasilar insufficiency), vascular dementia (e.g., multi-infarct), leukomalacia, periventricular, and vascular headache (e.g., cluster headache or migraines).

[0672] In accordance with yet a further aspect of the present invention, there is provided a process for utilizing polynucleotides or polypeptides, as well as agonists or antagonists of the present invention, for therapeutic purposes, for example, to stimulate neurological cell proliferation and/or differentiation. Therefore, polynucleotides, polypeptides, agonists and/or antagonists of the invention may be used to treat and/or detect neurologic diseases. Moreover, polynucleotides or polypeptides, or agonists or antagonists of the invention, can be used as a marker or detector of a particular nervous system disease or disorder.

[0673] Examples of neurologic diseases which can be treated or detected with polynucleotides, polypeptides, agonists, and/or antagonists of the present invention include brain diseases, such as metabolic brain diseases which includes phenylketonuria such as maternal phenylketonuria, pyruvate carboxylase deficiency, pyruvate dehydrogenase complex deficiency, Wernicke's Encephalopathy, brain edema, brain neoplasms such as cerebellar neoplasms which include infratentorial neoplasms, cerebral ventricle neoplasms such as choroid plexus neoplasms, hypothalamic neoplasms, supratentorial neoplasms, canavan disease, cerebellar diseases such as cerebellar ataxia which include spinocerebellar degeneration such as ataxia telangiectasia, cerebellar dyssynergia, Friederich's Ataxia, Machado-Joseph Disease, olivopontocerebellar atrophy, cerebellar neoplasms such as infratentorial neoplasms, diffuse cerebral sclerosis such as encephalitis periaxialis, globoid cell leukodystrophy, metachromatic leukodystrophy and subacute sclerosing panencephalitis.

[0674] Additional neurologic diseases which can be treated or detected with polynucleotides, polypeptides, agonists, and/or antagonists of the present invention include cerebrovascular disorders (such as carotid artery diseases which include carotid artery thrombosis, carotid stenosis and Moyamoya Disease), cerebral amyloid angiopathy, cerebral aneurysm, cerebral anoxia, cerebral arteriosclerosis, cerebral arteriovenous malformations, cerebral artery diseases, cerebral embolism and thrombosis such as carotid artery thrombosis, sinus thrombosis and Wallenberg's Syndrome, cerebral hemorrhage such as epidural hematoma, subdural hematoma and subarachnoid hemorrhage, cerebral infarction, cerebral ischemia such as transient cerebral ischemia, Subclavian Steal Syndrome and vertebrobasilar insufficiency, vascular dementia such as multi-infarct dementia, periventricular leukomalacia, vascular headache such as cluster headache and migraine.

[0675] Additional neurologic diseases which can be treated or detected with polynucleotides, polypeptides, agonists, and/or antagonists of the present invention include dementia such as AIDS Dementia Complex, presenile dementia such as Alzheimer's Disease and Creutzfeldt-Jakob Syndrome, senile dementia such as Alzheimer's Disease and progressive supranuclear palsy, vascular dementia such as multi-infarct dementia, encephalitis which include encephalitis periaxialis, viral encephalitis such as epidemic encephalitis, Japanese Encephalitis, St. Louis Encephalitis, tick-borne encephalitis and West Nile Fever, acute disseminated encephalomyelitis, meningoencephalitis such as uveomeningoencephalitic syndrome, Postencephalitic Parkinson Disease and subacute sclerosing panencephalitis, encephalomalacia such as periventricular leukomalacia, epilepsy such as generalized epilepsy which includes infantile spasms, absence epilepsy, myoclonic epilepsy which includes MERRF Syndrome, tonic-clonic epilepsy, partial epilepsy such as complex partial epilepsy, frontal lobe epilepsy and temporal lobe epilepsy, post-traumatic epilepsy, status epilepticus such as Epilepsia Partialis Continua, and Hallervorden-Spatz Syndrome.

[0676] Additional neurologic diseases which can be treated or detected with polynucleotides, polypeptides, agonists, and/or antagonists of the present invention include hydrocephalus such as Dandy-Walker Syndrome and normal pressure hydrocephalus, hypothalamic diseases such as hypothalamic neoplasms, cerebral malaria, narcolepsy which includes cataplexy, bulbar poliomyelitis, cerebri pseudotumor, Rett Syndrome, Reye's Syndrome, thalamic diseases, cerebral toxoplasmosis, intracranial tuberculoma and Zellweger Syndrome, central nervous system infections such as AIDS Dementia Complex, Brain Abscess, subdural empyema, encephalomyelitis such as Equine Encephalomyelitis, Venezuelan Equine Encephalomyelitis, Necrotizing Hemorrhagic Encephalomyelitis, Visna, and cerebral malaria.

[0677] Additional neurologic diseases which can be treated or detected with polynucleotides, polypeptides, agonists, and/or antagonists of the present invention include meningitis such as arachnoiditis, aseptic meningtitis such as viral meningtitis which includes lymphocytic choriomeningitis, Bacterial meningtitis which includes Haemophilus Meningtitis, Listeria Meningtitis, Meningococcal Meningtitis such as Waterhouse-Friderichsen Syndrome, Pneumococcal Meningtitis and meningeal tuberculosis, fungal meningitis such as Cryptococcal Meningtitis, subdural effusion, meningoencephalitis such as uvemeningoencephalitic syndrome, myelitis such as transverse myelitis, neurosyphilis such as tabes dorsalis, poliomyelitis which includes bulbar poliomyelitis and postpoliomyelitis syndrome, prion diseases (such as Creutzfeldt-Jakob Syndrome, Bovine Spongiform Encephalopathy, Gerstmann-Straussler Syndrome, Kuru, Scrapie), and cerebral toxoplasmosis.

[0678] Additional neurologic diseases which can be treated or detected with polynucleotides, polypeptides, agonists, and/or antagonists of the present invention include central nervous system neoplasms such as brain neoplasms that include cerebellar neoplasms such as infratentorial neoplasms, cerebral ventricle neoplasms such as choroid plexus neoplasms, hypothalamic neoplasms and supratentorial neoplasms, meningeal neoplasms, spinal cord neoplasms which include epidural neoplasms, demyelinating diseases such as Canavan Diseases, diffuse cerebral sceloris which includes adrenoleukodystrophy, encephalitis periaxialis, globoid cell leukodystrophy, diffuse cerebral sclerosis such as metachromatic leukodystrophy, allergic encephalomyelitis, necrotizing hemorrhagic encephalomyelitis, progressive multifocal leukoencephalopathy, multiple sclerosis, central pontine myelinolysis, transverse myelitis, neuromyelitis optica, Scrapie, Swayback, Chronic Fatigue Syndrome, Visna, High Pressure Nervous Syndrome, Meningism, spinal cord diseases such as amyotonia congenita, amyotrophic lateral sclerosis, spinal muscular atrophy such as Werdnig-Hoffmann Disease, spinal cord compression, spinal cord neoplasms such as epidural neoplasms, syringomyelia, Tabes Dorsalis, Stiff-Man Syndrome, mental retardation such as Angelman Syndrome, Cri-du-Chat Syndrome, De Lange's Syndrome, Down Syndrome, Gangliosidoses such as gangliosidoses G(M1), Sandhoff Disease, Tay-Sachs Disease, Hartnup Disease, homocystinuria, Laurence-Moon- Biedl Syndrome, Lesch-Nyhan Syndrome, Maple Syrup Urine Disease, mucolipidosis such as fucosidosis, neuronal ceroid-lipofuscinosis, oculocerebrorenal syndrome, phenylketonuria such as maternal phenylketonuria, Prader-Willi Syndrome, Rett Syndrome, Rubinstein-Taybi Syndrome, Tuberous Sclerosis, WAGR Syndrome, nervous system abnormalities such as holoprosencephaly, neural tube defects such as anencephaly which includes hydrangencephaly, Arnold-Chairi Deformity, encephalocele, meningocele, meningomyelocele, spinal dysraphism such as spina bifida cystica and spina bifida occulta.

[0679] Additional neurologic diseases which can be treated or detected with polynucleotides, polypeptides, agonists, and/or antagonists of the present invention include hereditary motor and sensory neuropathies which include Charcot-Marie Disease, Hereditary optic atrophy, Refsum's Disease, hereditary spastic paraplegia, Werdnig-Hoffmann Disease, Hereditary Sensory and Autonomic Neuropathies such as Congenital Analgesia and Familial Dysautonomia, Neurologic manifestations (such as agnosia that include Gerstmann's Syndrome, Amnesia such as retrograde amnesia, apraxia, neurogenic bladder, cataplexy, communicative disorders such as hearing disorders that includes deafness, partial hearing loss, loudness recruitment and tinnitus, language disorders such as aphasia which include agraphia, anomia, broca aphasia, and Wernicke Aphasia, Dyslexia such as Acquired Dyslexia, language development disorders, speech disorders such as aphasia which includes anomia, broca aphasia and Wernicke Aphasia, articulation disorders, communicative disorders such as speech disorders which include dysarthria, echolalia, mutism and stuttering, voice disorders such as aphonia and hoarseness, decerebrate state, delirium, fasciculation, hallucinations, meningism, movement disorders such as angelman syndrome, ataxia, athetosis, chorea, dystonia, hypokinesia, muscle hypotonia, myoclonus, tic, torticollis and tremor, muscle hypertonia such as muscle rigidity such as stiff-man syndrome, muscle spasticity, paralysis such as facial paralysis which includes Herpes Zoster Oticus, Gastroparesis, Hemiplegia, ophthalmoplegia such as diplopia, Duane's Syndrome, Horner's Syndrome, Chronic progressive external ophthalmoplegia such as Kearns Syndrome, Bulbar Paralysis, Tropical Spastic Paraparesis, Paraplegia such as Brown-Sequard Syndrome, quadriplegia, respiratory paralysis and vocal cord paralysis, paresis, phantom limb, taste disorders such as ageusia and dysgeusia, vision disorders such as amblyopia, blindness, color vision defects, diplopia, hemianopsia, scotoma and subnormal vision, sleep disorders such as hypersomnia which includes Kleine-Levin Syndrome, insomnia, and somnambulism, spasm such as trismus, unconsciousness such as coma, persistent vegetative state and syncope and vertigo, neuromuscular diseases such as amyotonia congenita, amyotrophic lateral sclerosis, Lambert-Eaton Myasthenic Syndrome, motor neuron disease, muscular atrophy such as spinal muscular atrophy, Charcot-Marie Disease and Werdnig-Hoffmann Disease, Postpoliomyelitis Syndrome, Muscular Dystrophy, Myasthenia Gravis, Myotonia Atrophica, Myotonia Confenita, Nemaline Myopathy, Familial Periodic Paralysis, Multiplex Paramyloclonus, Tropical Spastic Paraparesis and Stiff-Man Syndrome, peripheral nervous system diseases such as acrodynia, amyloid neuropathies, autonomic nervous system diseases such as Adie's Syndrome, Barre-Lieou Syndrome, Familial Dysautonomia, Horner's Syndrome, Reflex Sympathetic Dystrophy and Shy-Drager Syndrome, Cranial Nerve Diseases such as Acoustic Nerve Diseases such as Acoustic Neuroma which includes Neurofibromatosis 2, Facial Nerve Diseases such as Facial Neuralgia, Melkersson-Rosenthal Syndrome, ocular motility disorders which includes amblyopia, nystagmus, oculomotor nerve paralysis, ophthalmoplegia such as Duane's Syndrome, Horner's Syndrome, Chronic Progressive External Ophthalmoplegia which includes Kearns Syndrome, Strabismus such as Esotropia and Exotropia, Oculomotor Nerve Paralysis, Optic Nerve Diseases such as Optic Atrophy which includes Hereditary Optic Atrophy, Optic Disk Drusen, Optic Neuritis such as Neuromyelitis Optica, Papilledema, Trigeminal Neuralgia, Vocal Cord Paralysis, Demyelinating Diseases such as Neuromyelitis Optica and Swayback, and Diabetic neuropathies such as diabetic foot.

[0680] Additional neurologic diseases which can be treated or detected with polynucleotides, polypeptides, agonists, and/or antagonists of the present invention include nerve compression syndromes such as carpal tunnel syndrome, tarsal tunnel syndrome, thoracic outlet syndrome such as cervical rib syndrome, ulnar nerve compression syndrome, neuralgia such as causalgia, cervico-brachial neuralgia, facial neuralgia and trigeminal neuralgia, neuritis such as experimental allergic neuritis, optic neuritis, polyneuritis, polyradiculoneuritis and radiculities such as polyradiculitis, hereditary motor and sensory neuropathies such as Charcot-Marie Disease, Hereditary Optic Atrophy, Refsum's Disease, Hereditary Spastic Paraplegia and Werdnig-Hoffmann Disease, Hereditary Sensory and Autonomic Neuropathies which include Congenital Analgesia and Familial Dysautonomia, POEMS Syndrome, Sciatica, Gustatory Sweating and Tetany).

### Endocrine Disorders

[0681] Polynucleotides or polypeptides, or agonists or antagonists of the present invention, may be used to treat, prevent, diagnose, and/or prognose disorders and/or diseases related to hormone imbalance, and/or disorders or diseases of the endocrine system.

[0682] Hormones secreted by the glands of the endocrine system control physical growth, sexual function, metabolism, and other functions. Disorders may be classified in two ways: disturbances in the production of hormones, and the inability of tissues to respond to hormones. The etiology of these hormone imbalance or endocrine system diseases, disorders or conditions may be genetic, somatic, such as cancer and some autoimmune diseases, acquired (e.g., by chemotherapy, injury or toxins), or infectious. Moreover, polynucleotides, polypeptides, antibodies, and/or agonists or antagonists of the present invention can be used as a marker or detector of a particular disease or disorder related to the endocrine system and/or hormone imbalance.

[0683] Endocrine system and/or hormone imbalance and/or diseases encompass disorders of uterine motility including, but not limited to: complications with pregnancy and labor (e.g., pre-term labor, post-term pregnancy, spontaneous abortion, and slow or stopped labor); and disorders and/or diseases of the menstrual cycle (e.g., dysmenorrhea and endometriosis).

[0684] Endocrine system and/or hormone imbalance disorders and/or diseases include disorders and/or diseases of the pancreas, such as, for example, diabetes mellitus, diabetes insipidus, congenital pancreatic agenesis, pheochromocytoma—islet cell tumor syndrome; disorders and/or diseases of the adrenal glands such as, for example, Addison's Disease, corticosteroid deficiency, virilizing disease, hirsutism, Cushing's Syndrome, hyperaldosteronism, pheochromocytoma; disorders and/or diseases of the pituitary gland, such as, for example, hyperpituitarism, hypopituitarism, pituitary dwarfism, pituitary adenoma, panhypopituitarism, acromegaly, gigantism; disorders and/or diseases of the thyroid, including but not limited to, hyperthyroidism, hypothyroidism, Plummer's disease, Graves' disease (toxic diffuse goiter), toxic nodular goiter, thyroiditis (Hashimoto's thyroiditis, subacute granulomatous thyroiditis, and silent lymphocytic thyroiditis), Pendred's syndrome, myxedema, cretinism, thyrotoxicosis, thyroid hormone coupling defect, thymic aplasia, Hurthle cell tumours of the thyroid, thyroid cancer, thyroid carcinoma, Medullary thyroid carcinoma; disorders and/or diseases of the parathyroid, such as, for example, hyperparathyroidism, hypoparathyroidism; disorders and/or diseases of the hypothalamus.

[0685] In addition, endocrine system and/or hormone imbalance disorders and/or diseases may also include disorders and/or diseases of the testes or ovaries, including cancer. Other disorders and/or diseases of the testes or ovaries further include, for example, ovarian cancer, polycystic ovary syndrome, Klinefelter's syndrome, vanishing testes syndrome (bilateral anorchia), congenital absence of Leydig's cells, cryptorchidism, Noonan's syndrome, myotonic dystrophy, capillary haemangioma of the testis (benign), neoplasias of the testis and neo-testis.

[0686] Moreover, endocrine system and/or hormone imbalance disorders and/or diseases may also include disorders and/or diseases such as, for example, polyglandular deficiency syndromes, pheochromocytoma, neuroblastoma, multiple Endocrine neoplasia, and disorders and/or cancers of endocrine tissues.

[0687] In another embodiment, a polypeptide of the invention, or polynucleotides, antibodies, agonists, or antagonists corresponding to that polypeptide, may be used to diagnose, prognose, prevent, and/or treat endocrine diseases and/or disorders associated with the tissue(s) in which the polypeptide of the invention is expressed, including one, two, three, four, five, or more tissues disclosed in Table 1A, column 7 (Tissue Distribution Library Code).

### Reproductive System Disorders

[0688] The polynucleotides or polypeptides, or agonists or antagonists of the invention may be used for the diagnosis, treatment, or prevention of diseases and/or disorders of the reproductive system. Reproductive system disorders that can be treated by the compositions of the invention, include, but are not limited to, reproductive system injuries, infections, neoplastic disorders, congenital defects, and diseases or disorders which result in infertility, complications with pregnancy, labor, or parturition, and postpartum difficulties.

[0689] Reproductive system disorders and/or diseases include diseases and/or disorders of the testes, including, but not limited to, testicular atrophy, testicular feminization, cryptorchism (unilateral and bilateral), anorchia, ectopic testis, epididymitis and orchitis (typically resulting from infections such as, for example, gonorrhea, mumps, tuberculosis, and syphilis), testicular torsion, vasitis nodosa, germ cell tumors (e.g., seminomas, embryonal cell carcinomas, teratocarcinomas, choriocarcinomas, yolk sac tumors, and teratomas), stromal tumors (e.g., Leydig cell tumors), hydrocele, hematocele, varicocele, spermatocele, inguinal hernia, and disorders of sperm production (e.g., immotile cilia syndrome, aspermia, asthenozoospermia, azoospermia, oligospermia, and teratozoospermia).

[0690] Reproductive system disorders also include, but are not limited to, disorders of the prostate gland, such as acute non-bacterial prostatitis, chronic non-bacterial prostatitis, acute bacterial prostatitis, chronic bacterial prostatitis, prostatodystonia, prostatosis, granulomatous prostatitis, malacoplakia, benign prostatic hypertrophy or hyperplasia, and prostate neoplastic disorders, including adenocarcinomas, transitional cell carcinomas, ductal carcinomas, and squamous cell carcinomas.

[0691] Additionally, the compositions of the invention may be useful in the diagnosis, treatment, and/or prevention of disorders or diseases of the penis and urethra, including, but not limited to, inflammatory disorders, such as balanoposthitis, balanitis xerotica obliterans, phimosis, paraphimosis, syphilis, herpes simplex virus, gonorrhea, non-gonococcal urethritis, chlamydia, mycoplasma, trichomonas, HIV, AIDS, Reiter's syndrome, condyloma acuminatum, condyloma latum, and pearly penile papules; urethral abnormalities, such as hypospadias, epispadias, and phimosis; premalignant lesions, including Erythroplasia of Queyrat, Bowen's disease, Bowenoid paplosis, giant condyloma of Buscke-Lowenstein, and varrucous carcinoma; penile cancers, including squamous cell carcinomas, carcinoma in situ, verrucous carcinoma, and disseminated penile carcinoma; urethral neoplastic disorders, including penile urethral carcinoma, bulbomembranous urethral carcinoma, and prostatic urethral carcinoma; and erectile disorders, such as priapism, Peyronie's disease, erectile dysfunction, and impotence.

[0692] Moreover, diseases and/or disorders of the vas deferens include, but are not limited to, vasculititis and CBAVD (congenital bilateral absence of the vas deferens); additionally, the polynucleotides, polypeptides, and agonists or antagonists of the present invention may be used in the diagnosis, treatment, and/or prevention of diseases and/or disorders of the seminal vesicles, including but not limited to, hydatid disease, congenital chloride diarrhea, and polycystic kidney disease.

[0693] Other disorders and/or diseases of the male reproductive system that may be diagnosed, treated, and/or prevented with the compositions of the invention include, but are not limited to, Klinefelter's syndrome, Young's syndrome, premature ejaculation, diabetes mellitus, cystic fibrosis, Kartagener's syndrome, high fever, multiple sclerosis, and gynecomastia.

[0694] Further, the polynucleotides, polypeptides, and agonists or antagonists of the present invention may be used in the diagnosis, treatment, and/or prevention of diseases and/or disorders of the vagina and vulva, including, but not limited to, bacterial vaginosis, candida vaginitis, herpes simplex virus, chancroid, granuloma inguinale, lymphogranuloma venereum, scabies, human papillomavirus, vaginal trauma, vulvar trauma, adenosis, chlamydia vaginitis, gonorrhea, trichomonas vaginitis, condyloma acuminatum, syphilis, molluscum contagiosum, atrophic vaginitis, Paget's disease, lichen sclerosus, lichen planus, vulvodynia, toxic shock syndrome, vaginismus, vulvovaginitis, vulvar vestibulitis, and neoplastic disorders, such as squamous cell hyperplasia, clear cell carcinoma, basal cell carcinoma, melanomas, cancer of Bartholin's gland, and vulvar intraepithelial neoplasia.

[0695] Disorders and/or diseases of the uterus that may be diagnosed, treated, and/or prevented with the compositions of the invention include, but are not limited to, dysmenorrhea, retroverted uterus, endometriosis, fibroids, adenomyosis, anovulatory bleeding, amenorrhea, Cushing's syndrome, hydatidiform moles, Asherman's syndrome, premature menopause, precocious puberty, uterine polyps, dysfunctional uterine bleeding (e.g., due to aberrant hormonal signals), and neoplastic disorders, such as adenocarcinomas, keiomyosarcomas, and sarcomas. Additionally, the polypeptides, polynucleotides, or agonists or antagonists of the invention may be useful as a marker or detector of, as well as in the diagnosis, treatment, and/or prevention of congenital uterine abnormalities, such as bicornuate uterus, septate uterus, simple unicornuate uterus, unicornuate uterus with a noncavitary rudimentary horn, unicornuate uterus with a non-communicating cavitary rudimentary horn, unicornuate uterus with a communicating cavitary horn, arcuate uterus, uterine didelfus, and T-shaped uterus.

[0696] Ovarian diseases and/or disorders that may be diagnosed, treated, and/or prevented with the compositions of the invention include, but are not limited to, anovulation, polycystic ovary syndrome (Stein-Leventhal syndrome), ovarian cysts, ovarian hypofunction, ovarian insensitivity to gonadotropins, ovarian overproduction of androgens, right ovarian vein syndrome, amenorrhea, hirutism, and ovarian cancer (including, but not limited to, primary and secondary cancerous growth, Sertoli-Leydig tumors, endometriod carcinoma of the ovary, ovarian papillary serous adenocarcinoma, ovarian mucinous adenocarcinoma, and Ovarian Krukenberg tumors).

[0697] Cervical diseases and/or disorders that may be diagnosed, treated, and/or prevented with the compositions of the invention include, but are not limited to, cervicitis, chronic cervicitis, mucopurulent cervicitis, cervical dysplasia, cervical polyps, Nabothian cysts, cervical erosion, cervical incompetence, and cervical neoplasms (including, for example, cervical carcinoma, squamous metaplasia, squamous cell carcinoma, adenosquamous cell neoplasia, and columnar cell neoplasia).

[0698] Additionally, diseases and/or disorders of the reproductive system that may be diagnosed, treated, and/or prevented with the compositions of the invention include, but are not limited to, disorders and/or diseases of pregnancy, including miscarriage and stillbirth, such as early abortion, late abortion, spontaneous abortion, induced abortion, therapeutic abortion, threatened abortion, missed abortion, incomplete abortion, complete abortion, habitual abortion, missed abortion, and septic abortion; ectopic pregnancy, anemia, Rh incompatibility, vaginal bleeding during pregnancy, gestational diabetes, intrauterine growth retardation, polyhydramnios, HELLP syndrome, abruptio placentae, placenta previa, hyperemesis, preeclampsia, eclampsia, herpes gestationis, and urticaria of pregnancy. Additionally, the polynucleotides, polypeptides, and agonists or antagonists of the present invention may be used in the diagnosis, treatment, and/or prevention of diseases that can complicate pregnancy, including heart disease, heart failure, rheumatic heart disease, congenital heart disease, mitral valve prolapse, high blood pressure, anemia, kidney disease, infectious disease (e.g., rubella, cytomegalovirus, toxoplasmosis, infectious hepatitis, chlamydia, HIV, AIDS, and genital herpes), diabetes mellitus, Graves' disease, thyroiditis, hypothyroidism, Hashimoto's thyroiditis, chronic active hepatitis, cirrhosis of the liver, primary biliary cirrhosis, asthma, systemic lupus eryematosis, rheumatoid arthritis, myasthenia gravis, idiopathic thrombocytopenic purpura, appendicitis, ovarian cysts, gallbladder disorders,and obstruction of the intestine.

[0699] Complications associated with labor and parturition that may be diagnosed, treated, and/or prevented with the compositions of the invention include, but are not limited to, premature rupture of the membranes, pre-term labor, post-term pregnancy, postmaturity, labor that progresses too slowly, fetal distress (e.g., abnormal heart rate (fetal or maternal), breathing problems, and abnormal fetal position), shoulder dystocia, prolapsed umbilical cord, amniotic fluid embolism, and aberrant uterine bleeding.

[0700] Further, diseases and/or disorders of the postdelivery period, that may be diagnosed, treated, and/or prevented with the compositions of the invention, include, but are not limited to, endometritis, myometritis, parametritis, peritonitis, pelvic thrombophlebitis, pulmonary embolism, endotoxemia, pyelonephritis, saphenous thrombophlebitis, mastitis, cystitis, postpartum hemorrhage, and inverted uterus.

[0701] Other disorders and/or diseases of the female reproductive system that may be diagnosed, treated, and/or prevented by the polynucleotides, polypeptides, and agonists or antagonists of the present invention include, but are not limited to, Turner's syndrome, pseudohermaphroditism, premenstrual syndrome, pelvic inflammatory disease, pelvic congestion (vascular engorgement), frigidity, anorgasmia, dyspareunia, ruptured fallopian tube, and Mittelschmerz.

### Developmental and Inherited Disorders

[0702] Polynuceotides or polypeptides, or agonists or antagonists of the present invention may be used to treat, prevent, diagnose, and/or prognose diseases associated with mixed fetal tissues, including, but not limited to, developmental and inherited disorders or defects of the nervous system, musculoskelelal system, execretory system, cardiovascular system, hematopoietic system, gastrointestinal system, reproductive system, and respiratory system. Compositions of the present invention may also be used to treat, prevent, diagnose, and/or prognose developmental and inherited disorders or defects associated with, but not limited to, skin, hair, visual, and auditory tissues, metabolism. Additionally, the compositions of the invention may be useful in the diagnosis, treatment, and/or prevention of disorders or diseases associated with, but not limited to, chromosomal or genetic abnormalities and hyperproliferation or neoplasia.

[0703] Disorders or defects of the nervous system associated with developmental or inherited abnormalities that may be diagnosed, treated, and/or prevented with the compostions of the invention include, but are not limited to, adrenoleukodystrophy, agenesis of corpus callosum, Alexander disease, anencephaly, Angelman syndrome, Arnold-Chiari deformity, Batten disease, Canavan disease, cephalic disorders, Charcot-Marie-Tooth disease, encephalocele, Friedreich's ataxia, Gaucher's disease, Gorlin syndrome, Hallervorden-Spatz disease, hereditary spastic paraplegia, Huntington disease, hydranencephaly, hydrocephalus, Joubert syndrome, Lesch-Nyhan syndrome, leukodystrophy, Menkes disease, microcephaly, Niemann-Pick Type C1, neurofibromatosis, porencephaly, progeria, proteus syndrome, Refsum disease, spina bifida, Sturge-Weber syndrome, Tay-Sachs disease, tuberous sclerosis, and von Hippel-Lindau disease.

[0704] Developmental and inherited disorders resulting in disorders or defects of the musculoskeletal system that may be diagnosed, treated, and/or prevented with the compositions of the invention include, but are not limited to, achondroplasia, atlanto-occipital fusion, arthrogryposis mulitplex congenita, autosomal recessive muscular dystrophy, Becker's muscular dystrophy, cerebral palsy, choanal atresia, cleft lip, cleft palate, clubfoot, congenital amputation, congenital dislocation of the hip, congenital torticollis, congenital scolosis, dopa-repsonsive dystonia, Duchenne muscular dystrophy, early-onset generalized dystonia, femoral torsion, Gorlin syndrome, hypophosphatasia, Klippel-Feil syndrome, knee dislocation, myoclonic dystonia, myotonic dystrophy, nail-patella syndrome, osteogenesis imperfecta, paroxysmal dystonia, progeria, prune-belly syndrome, rapid-onset dystonia parkinsonism, scolosis, syndactyly, Treacher Collins' syndrome, velocardiofacial syndrome, and X-linked dystonia-parkinsonism.

[0705] Developmental or hereditary disorders or defects of the excretory system that may be diagnosed, treated, and/or prevented with the compositions of the invention include, but are not limited to, Alport's syndrome, Bartter's syndrome, bladder diverticula, bladder exstrophy, cystinuria, epispadias, Fanconi's syndrome, Hartnup disease, horseshoe kidney, hypospadias, kidney agenesis, kidney ectopia, kidney malrotation, Liddle's syndrome, medullary cystic disease, medullary sponge, multicystic kidney, kidney polycystic kidney disease, nail-patella syndrome, Potter's syndrome, urinary tract flow obstruction, vitamin D-resistant rickets, and Wilm's tumor.

[0706] Cardiovascular disorders or defects of developmental or hereditary origin that may be diagnosed, treated, and/or prevented with the compositions of the invention include, but are not limited to, aortic valve stenosis, atrial septal defects, artioventricular (A-V) canal defect, bicuspid aortic valve, coarctation or the aorta, dextrocardia, Ebstein's anomaly, Eisenmenger's complex, hypoplastic left heart syndrome, Marfan syndrome, patent ductus arteriosus, progeria, pulmonary atresia, pulmonary valve stenosis, subaortic stenosis, tetralogy of fallot, total anomalous pulmonary venous (P-V) connection, transposition of the great arteries, tricuspid atresia, truncus arteriosus, ventricular septal defects. Developmental or inherited disorders resulting in disorders involving the hematopoietic system that may be diagnosed, treated, and/or prevented with the compositions of the invention include, but not limited to, Bernard-Soulier syndrome, Chédiak-Higashi syndrome, hemophilia, Hermansky-Pudlak syndrome, sickle cell anemia, storage pool disease, thromboxane A2 dysfunction, thrombasthenia, and von Willebrand's disease.

[0707] The compositions of the invention may also be used to diagnose, treat, and/or prevent developmental and inherited disorders resulting in disorders or defects of the gastrointestinal system, including, but not limited to, anal atresia, biliary atresia, esophageal atresia, diaphragmatic hernia, Hirschsprung's disease, Meckel's diverticulum, oligohydramnios, omphalocele, polyhydramnios, porphyria, situs inversus viscera. Developmental or inherited disorders resulting in metabolic disorders that may be diagnosed, treated, and/or prevented with the compositions of the invention include, but are not limited to, alpha-1 antitrypsin deficiency, cystic fibrosis, hemochromatosis, lysosomal storage disease, phenylketonuria, Wilson's disease, and Zellweger syndrome.

[0708] Disorders of the reproductive system that are developmentally or hereditary related that may also be diagnosed, treated, and/or prevented with the compositions of the invention include, but are not limited to, androgen insensitivity syndrome, ambiguous genitalia, autosomal sex reversal, congenital adreneal hyperplasia, gonadoblastoma, ovarian germ cell cancer, pseudohermphroditism, true hermaphroditism, undescended testis, XX male syndrome, and XY female type gonadal dysgenesis. The compositions of the invention may also be used to diagnose, treat, and/or prevent developmental or inherited respiratory defects including, but not limited to, askin tumor, azygos lobe, congenital diaphragmatic hernia, congenital lobar emphysema, cystic adenomatoid malformation, lobar emphysema, hyaline membrane disease, and pectus excavatum.

[0709] Developmental or inherited disorders may also result from chromosomal or genetic aberration that may be diagnosed, treated, and/or prevented with the compositions of the invention including, but not limited to, 4p-syndrome, cri du chat syndrome, Digeorge syndrome, Down's syndrome, Edward's syndrome, fragile X syndrome, Klinefelter's syndrome, Patau's syndrome, Prader-Willi syndrome, progeria, Turner's syndrome, triple X syndrome, and XYY syndrome. Other developmental disorders that can be diagnosed, treated, and/or prevented with the compositions of the invention, include, but are not limited to, fetal alcohol syndrome, and can be caused by environmental factors surrounding the developing fetus.

[0710] The compositions of the invention may further be able to be used to diagnose, treat, and/or prevent errors in development or a genetic disposition that may result in hyperproliferative disorders or neoplasms, including, but not limited to, acute childhood lymphoblastic leukemia, askin tumor, Beckwith-Wiedemann syndrome, childhood acute myeloid leukemia, childhood brain stem glioma, childhood cerebellar astrocytoma, childhood extracranial germ cell tumors childhood (primary), gonadoblastoma, hepatocellular cancer, childhood Hodgkin's disease, childhood Hodgkin's lymphoma, childhood hypothalamic and visual pathway glioma, childhood (primary) liver cancer, childhood lymphoblastic leukemia, childhood medulloblastoma, childhood non-Hodgkin's lymphoma, childhood pineal and supratentorial primitive neuroectodermal tumors, childhood primary liver cancer, childhood rhabdomyosarcoma, childhood soft tissue sarcoma, Gorlin syndrome, familial multiple endrocrine neoplasia type 1, neuroblastoma, ovarian germ cell cancer, pheochromocytoma, retinoblastoma, and Wilm's tumor.

[0711] Polypeptides may be administered using any method known in the art, including, but not limited to, direct needle injection at the delivery site, intravenous injection, topical administration, catheter infusion, biolistic injectors, particle accelerators, gelfoam sponge depots, other commercially available depot materials, osmotic pumps, oral or suppositorial solid pharmaceutical formulations, decanting or topical applications during surgery, aerosol delivery. Such methods are known in the art. Polypeptides may be administered as part of a Therapeutic, described in more detail below. Methods of delivering polynucleotides are described in more detail herein.

### Diseases at the Cellular Level

[0712] Diseases associated with increased cell survival or the inhibition of apoptosis that could be treated, prevented, diagnosed and/or prognosed using polynucleotides or polypeptides, as well as antagonists or agonists of the present invention, include cancers (such as follicular lymphomas, carcinomas with p53 mutations, and hormone-dependent tumors, including, but not limited to colon cancer, cardiac tumors, pancreatic cancer, melanoma, retinoblastoma, glioblastoma, lung cancer, intestinal cancer, testicular cancer, stomach cancer, neuroblastoma, myxoma, myoma, lymphoma, endothelioma, osteoblastoma, osteoclastoma, osteosarcoma, chondrosarcoma, adenoma, breast cancer, prostate cancer, Kaposi's sarcoma and ovarian cancer); autoimmune disorders (such as, multiple sclerosis, Sjogren's syndrome, Hashimoto's thyroiditis, biliary cirrhosis, Behcet's disease, Crohn's disease, polymyositis, systemic lupus erythematosus and immune-related glomerulonephritis and rheumatoid arthritis) and viral infections (such as herpes viruses, pox viruses and adenoviruses), inflammation, graft v. host disease, acute graft rejection, and chronic graft rejection.

[0713] In preferred embodiments, polynucleotides, polypeptides, and/or antagonists of the invention are used to inhibit growth, progression, and/or metastasis of cancers, in particular those [listed above] involving liver tissues.

[0714] Additional diseases or conditions associated with increased cell survival that could be treated or detected by polynucleotides or polypeptides, or agonists or antagonists of the present invention include, but are not limited to, progression, and/or metastases of malignancies and related disorders such as leukemia (including acute leukemias (e.g., acute lymphocytic leukemia, acute myelocytic leukemia (including myeloblastic, promyelocytic, myelomonocytic, monocytic, and erythroleukemia)) and chronic leukemias (e.g., chronic myelocytic (granulocytic) leukemia and chronic lymphocytic leukemia)), polycythemia vera, lymphomas (e.g., Hodgkin's disease and non-Hodgkin's disease), multiple myeloma, Waldenstrom's macroglobulinemia, heavy chain disease, and solid tumors including, but not limited to, sarcomas and carcinomas such as fibrosarcoma, myxosarcoma, liposarcoma, chondrosarcoma, osteogenic sarcoma, chordoma, angiosarcoma, endotheliosarcoma, lymphangiosarcoma, lymphangioendotheliosarcoma, synovioma, mesothelioma, Ewing's tumor, leiomyosarcoma, rhabdomyosarcoma, colon carcinoma, pancreatic cancer, breast cancer, ovarian cancer, prostate cancer, squamous cell carcinoma, basal cell carcinoma, adenocarcinoma, sweat gland carcinoma, sebaceous gland carcinoma, papillary carcinoma, papillary adenocarcinomas, cystadenocarcinoma, medullary carcinoma, bronchogenic carcinoma, renal cell carcinoma, hepatoma, bile duct carcinoma, choriocarcinoma, seminoma, embryonal carcinoma, Wilm's tumor, cervical cancer, testicular tumor, lung carcinoma, small cell lung carcinoma, bladder carcinoma, epithelial carcinoma, glioma, astrocytoma, medulloblastoma, craniopharyngioma, ependymoma, pinealoma, hemangioblastoma, acoustic neuroma, oligodendroglioma, menangioma, melanoma, neuroblastoma, and retinoblastoma.

[0715] Diseases associated with increased apoptosis that could be treated, prevented, diagnosted, and/or prognosed using polynucleotides or polypeptides, as well as agonists or antagonists of the present invention, include, but are not limited to, AIDS; neurodegenerative disorders (such as Alzheimer's disease, Parkinson's disease, Amyotrophic lateral sclerosis, Retinitis pigmentosa, Cerebellar degeneration and brain tumor or prior associated disease); autoimmune disorders (such as, multiple sclerosis, Sjogren's syndrome, Hashimoto's thyroiditis, biliary cirrhosis, Behcet's disease, Crohn's disease, polymyositis, systemic lupus erythematosus and immune-related glomerulonephritis and rheumatoid arthritis) myelodysplastic syndromes (such as aplastic anemia), graft v. host disease, ischemic injury (such as that caused by myocardial infarction, stroke and reperfusion injury), liver injury (e.g., hepatitis related liver injury, ischemia/reperfusion injury, cholestosis (bile duct injury) and liver cancer); toxin-induced liver disease (such as that caused by alcohol), septic shock, cachexia and anorexia.

### Wound Healing and Epithelial Cell Proliferation

[0716] In accordance with yet a further aspect of the present invention, there is provided a process for utilizing polynucleotides or polypeptides, as well as agonists or antagonists of the present invention, for therapeutic purposes, for example, to stimulate epithelial cell proliferation and basal keratinocytes for the purpose of wound healing, and to stimulate hair follicle production and healing of dermal wounds. Polynucleotides or polypeptides, as well as agonists or antagonists of the present invention, may be clinically useful in stimulating wound healing including surgical wounds, excisional wounds, deep wounds involving damage of the dermis and epidermis, eye tissue wounds, dental tissue wounds, oral cavity wounds, diabetic ulcers, dermal ulcers, cubitus ulcers, arterial ulcers, venous stasis ulcers, burns resulting from heat exposure or chemicals, and other abnormal wound healing conditions such as uremia, malnutrition, vitamin deficiencies and complications associated with systemic treatment with steroids, radiation therapy and antineoplastic drugs and antimetabolites. Polynucleotides or polypeptides, as well as agonists or antagonists of the present invention, could be used to promote dermal reestablishment subsequent to dermal loss.

[0717] Polynucleotides or polypeptides, as well as agonists or antagonists of the present invention, could be used to increase the adherence of skin grafts to a wound bed and to stimulate re-epithelialization from the wound bed. The following are types of grafts that polynucleotides or polypeptides, agonists or antagonists of the present invention, could be used to increase adherence to a wound bed: autografts, artificial skin, allografts, autodermic graft, autoepdermic grafts, avacular grafts, Blair-Brown grafts, bone graft, brephoplastic grafts, cutis graft, delayed graft, dermic graft, epidermic graft, fascia graft, full thickness graft, heterologous graft, xenograft, homologous graft, hyperplastic graft, lamellar graft, mesh graft, mucosal graft, Ollier-Thiersch graft, omenpal graft, patch graft, pedicle graft, penetrating graft, split skin graft, thick split graft. Polynucleotides or polypeptides, as well as agonists or antagonists of the present invention, can be used to promote skin strength and to improve the appearance of aged skin.

[0718] It is believed that polynucleotides or polypeptides, as well as agonists or antagonists of the present invention, will also produce changes in hepatocyte proliferation, and epithelial cell proliferation in the lung, breast, pancreas, stomach, small intestine, and large intestine. Polynucleotides or polypeptides, as well as agonists or antagonists of the present invention, could promote proliferation of epithelial cells such as sebocytes, hair follicles, hepatocytes, type II pneumocytes, mucin-producing goblet cells, and other epithelial cells and their progenitors contained within the skin, lung, liver, and gastrointestinal tract. Polynucleotides or polypeptides, agonists or antagonists of the present invention, may promote proliferation of endothelial cells, keratinocytes, and basal keratinocytes.

[0719] Polynucleotides or polypeptides, as well as agonists or antagonists of the present invention, could also be used to reduce the side effects of gut toxicity that result from radiation, chemotherapy treatments or viral infections. Polynucleotides or polypeptides, as well as agonists or antagonists of the present invention, may have a cytoprotective effect on the small intestine mucosa. Polynucleotides or polypeptides, as well as agonists or antagonists of the present invention, may also stimulate healing of mucositis (mouth ulcers) that result from chemotherapy and viral infections.

[0720] Polynucleotides or polypeptides, as well as agonists or antagonists of the present invention, could further be used in full regeneration of skin in full and partial thickness skin defects, including burns, (i.e., repopulation of hair follicles, sweat glands, and sebaceous glands), treatment of other skin defects such as psoriasis. Polynucleotides or polypeptides, as well as agonists or antagonists of the present invention, could be used to treat epidermolysis bullosa, a defect in adherence of the epidermis to the underlying dermis which results in frequent, open and painful blisters by accelerating reepithelialization of these lesions. Polynucleotides or polypeptides, as well as agonists or antagonists of the present invention, could also be used to treat gastric and doudenal ulcers and help heal by scar formation of the mucosal lining and regeneration of glandular mucosa and duodenal mucosal lining more rapidly. Inflammatory bowel diseases, such as Crohn's disease and ulcerative colitis, are diseases, which result in destruction of the mucosal surface of the small or large intestine, respectively. Thus, polynucleotides or polypeptides, as well as agonists or antagonists of the present invention, could be used to promote the resurfacing of the mucosal surface to aid more rapid healing and to prevent progression of inflammatory bowel disease. Treatment with polynucleotides or polypeptides, agonists or antagonists of the present invention, is expected to have a significant effect on the production of mucus throughout the gastrointestinal tract and could be used to protect the intestinal mucosa from injurious substances that are ingested or following surgery. Polynucleotides or polypeptides, as well as agonists or antagonists of the present invention, could be used to treat diseases associate with the under expression.

[0721] Moreover, polynucleotides or polypeptides, as well as agonists or antagonists of the present invention, could be used to prevent and heal damage to the lungs due to various pathological states. Polynucleotides or polypeptides, as well as agonists or antagonists of the present invention, could stimulate proliferation and differentiation and promote the repair of alveoli and brochiolar epithelium to prevent or treat acute or chronic lung damage. For example, emphysema, which results in the progressive loss of aveoli, and inhalation injuries, i.e., resulting from smoke inhalation and bums, that cause necrosis of the bronchiolar epithelium and alveoli could be effectively treated using polynucleotides or polypeptides, agonists or antagonists of the present invention. Also, polynucleotides or polypeptides, as well as agonists or antagonists of the present invention, could be used to stimulate the proliferation of and differentiation of type II pneumocytes, which may help treat or prevent disease such as hyaline membrane diseases, such as infant respiratory distress syndrome and bronchopulmonary displasia, in premature infants.

[0722] Polynucleotides or polypeptides, as well as agonists or antagonists of the present invention, could stimulate the proliferation and differentiation of hepatocytes and, thus, could be used to alleviate or treat liver diseases and pathologies such as fulminant liver failure caused by cirrhosis, liver damage caused by viral hepatitis and toxic substances (i.e., acetaminophen, carbon tetraholoride and other hepatotoxins known in the art).

[0723] In addition, polynucleotides or polypeptides, as well as agonists or antagonists of the present invention, could be used treat or prevent the onset of diabetes mellitus. In patients with newly diagnosed Types I and II diabetes, where some islet cell function remains, polynucleotides or polypeptides, as well as agonists or antagonists of the present invention, could be used to maintain the islet function so as to alleviate, delay or prevent permanent manifestation of the disease. Also, polynucleotides or polypeptides, as well as agonists or antagonists of the present invention, could be used as an auxiliary in islet cell transplantation to improve or promote islet cell function.

### Infectious Disease

[0724] Polynucleotides or polypeptides, as well as agonists or antagonists of the present invention can be used to treat or detect infectious agents. For example, by increasing the immune response, particularly increasing the proliferation and differentiation of B and/or T cells, infectious diseases may be treated. The immune response may be increased by either enhancing an existing immune response, or by initiating a new immune response. Alternatively, polynucleotides or polypeptides, as well as agonists or antagonists of the present invention may also directly inhibit the infectious agent, without necessarily eliciting an immune response.

[0725] Viruses are one example of an infectious agent that can cause disease or symptoms that can be treated or detected by a polynucleotide or polypeptide and/or agonist or antagonist of the present invention. Examples of viruses, include, but are not limited to Examples of viruses, include, but are not limited to the following DNA and RNA viruses and viral families: Arbovirus, Adenoviridae, Arenaviridae, Arterivirus, B imaviridae, Bunyaviridae, Caliciviridae, Circoviridae, Coronaviridae, Dengue, EBV, HIV, Flaviviridae, Hepadnaviridae (Hepatitis), Herpesviridae (such as, Cytomegalovirus, Herpes Simplex, Herpes Zoster), Mononegavirus (e.g., Paramyxoviridae, Morbillivirus, Rhabdoviridae), Orthomyxoviridae (e.g., Influenza A, Influenza B, and parainfluenza), Papiloma virus, Papovaviridae, Parvoviridae, Picornaviridae, Poxviridae (such as Smallpox or Vaccinia), Reoviridae (e.g., Rotavirus), Retroviridae (HTLV-I, HTLV-II, Lentivirus), and Togaviridae (e.g., Rubivirus). Viruses falling within these families can cause a variety of diseases or symptoms, including, but not limited to: arthritis, bronchiollitis, respiratory syncytial virus, encephalitis, eye infections (e.g., conjunctivitis, keratitis), chronic fatigue syndrome, hepatitis (A, B, C, E, Chronic Active, Delta), Japanese B encephalitis, Junin, Chikungunya, Rift Valley fever, yellow fever, meningitis, opportunistic infections (e.g., AIDS), pneumonia, Burkitt's Lymphoma, chickenpox, hemorrhagic fever, Measles, Mumps, Parainfluenza, Rabies, the common cold, Polio, leukemia, Rubella, sexually transmitted diseases, skin diseases (e.g., Kaposi's, warts), and viremia. polynucleotides or polypeptides, or agonists or antagonists of the invention, can be used to treat or detect any of these symptoms or diseases. In specific embodiments, polynucleotides, polypeptides, or agonists or antagonists of the invention are used to treat: meningitis, Dengue, EBV, and/or hepatitis (e.g., hepatitis B). In an additional specific embodiment polynucleotides, polypeptides, or agonists or antagonists of the invention are used to treat patients nonresponsive to one or more other commercially available hepatitis vaccines. In a further specific embodiment polynucleotides, polypeptides, or agonists or antagonists of the invention are used to treat AIDS.

[0726] Similarly, bacterial or fungal agents that can cause disease or symptoms and that can be treated or detected by a polynucleotide or polypeptide and/or agonist or antagonist of the present invention include, but not limited to, include, but not limited to, the following Gram-Negative and Gram-positive bacteria and bacterial families and fungi: Actinomycetales (e.g., Corynebacterium, Mycobacterium, Norcardia), Cryptococcus neoformans, Aspergillosis, Bacillaceae (e.g., Anthrax, Clostridium), Bacteroidaceae, Blastomycosis, Bordetella, Borrelia (e.g., Borrelia burgdorferi, Brucellosis, Candidiasis, Campylobacter, Coccidioidomycosis, Cryptococcosis, Dermatocycoses, E. coli (e.g., Enterotoxigenic E. coli and Enterohemorrhagic E. coli), Enterobacteriaceae (Klebsiella, Salmonella (e.g., Salmonella typhi, and Salmonella paratyphi), Serratia, Yersinia), Erysipelothrix, Helicobacter, Legionellosis, Leptospirosis, Listeria, Mycoplasmatales, Mycobacterilini leprae, Vibrio cholerae, Neisseriaceae (e.g., Acinetobacter, Gonorrhea, Menigococcal), Meisseria meningitidis, Pasteurellacea Infections (e.g., Actinobacillus, Heamophilus (e.g., Heamophilus influenza type B), Pasteurella), Pseudomonas, Rickettsiaceae, Chlamydiaceae, Treponema spp., Leptospira spp., Shigella spp., Staphylococcal, Meningiococcal, Pneumococcal and Streptococcal (e.g., Streptococcus pneumoniae and Group B Streptococcus). These bacterial or fungal families can cause the following diseases or symptoms, including, but not limited to: bacteremia, endocarditis, eye infections (conjunctivitis, tuberculosis, uveitis), gingivitis, opportunistic infections (e.g., AIDS related infections), paronychia, prosthesis-related infections, Reiter's Disease, respiratory tract infections, such as Whooping Cough or Empyema, sepsis, Lyme Disease, Cat-Scratch Disease, Dysentery, Paratyphoid Fever, food poisoning, Typhoid, pneumonia, Gonorrhea, meningitis (e.g., mengitis types A and B), Chlamydia, Syphilis, Diphtheria, Leprosy, Paratuberculosis, Tuberculosis, Lupus, Botulism, gangrene, tetanus, impetigo, Rheumatic Fever, Scarlet Fever, sexually transmitted diseases, skin diseases (e.g., cellulitis, dermatocycoses), toxemia, urinary tract infections, wound infections. Polynucleotides or polypeptides, agonists or antagonists of the invention, can be used to treat or detect any of these symptoms or diseases. In specific embodiments, Ppolynucleotides, polypeptides, agonists or antagonists of the invention are used to treat: tetanus, Diptheria, botulism, and/or meningitis type B.

[0727] Moreover, parasitic agents causing disease or symptoms that can be treated or detected by a polynucleotide or polypeptide and/or agonist or antagonist of the present invention include, but not limited to, the following families or class: Amebiasis, Babesiosis, Coccidiosis, Cryptosporidiosis, Dientamoebiasis, Dourine, Ectoparasitic, Giardiasis, Helminthiasis, Leishmaniasis, Theileriasis, Toxoplasmosis, Trypanosomiasis, and Trichomonas and Sporozoans (e.g., Plasmodium virax, Plasmodium falciparium, Plasmodium malariae and Plasmodium ovale). These parasites can cause a variety of diseases or symptoms, including, but not limited to: Scabies, Trombiculiasis, eye infections, intestinal disease (e.g., dysentery, giardiasis), liver disease, lung disease, opportunistic infections (e.g., AIDS related), malaria, pregnancy complications, and toxoplasmosis. polynucleotides or polypeptides, or agonists or antagonists of the invention, can be used to treat or detect any of these symptoms or diseases.

[0728] Polynucleotides or polypeptides, as well as agonists or antagonists of the present invention of the present invention could either be by administering an effective amount of a polypeptide to the patient, or by removing cells from the patient, supplying the cells with a polynucleotide of the present invention, and returning the engineered cells to the patient (ex vivo therapy). Moreover, the polypeptide or polynucleotide of the present invention can be used as an antigen in a vaccine to raise an immune response against infectious disease.

### Regeneration

[0729] Polynucleotides or polypeptides, as well as agonists or antagonists of the present invention can be used to differentiate, proliferate, and attract cells, leading to tye regeneration of tissues. (See, Science 276:59-87 (1997).) The regeneration of tissues could be used to repair, replace, or protect tissue damaged by congenital defects, trauma (wounds, bums, incisions, or ulcers), age, disease (e.g. osteoporosis, ostecarthritis, periodontal disease, liver failure), surgery, including cosmetic plastic surgery, fibrosis, reperfusion injury, or systemic cytokine damage.

[0730] Tissues that could be regenerated using the present invention include organs (e.g., pancreas, liver, intestine, kidney, skin, endothelium), muscle (smooth, skeletal or cardiac), vasculature (including vascular and lymphatics), nervous, hematopoietic, and skeletal (bone, cartilage, tendon, and ligament) tissue. Preferably, regeneration occurs without or decreased scarring. Regeneration also may include angiogenesis.

[0731] Moreover, polynucleotides or polypeptides, as well as agonists or angtagonists of the present invention, may increase regeneration of tissues difficult to heal. For example, increased tendon/ligament regeneration would quicken recovery time after damage. Polynucleotides or polypeptides, as well as agonists or antagonists of the present invention could also be used prophylactically in an effort to avoid damage. Specific diseases that could be treated include of tendinitis, carpal tunnel syndrome, and other tendon or ligament defects. A further example of tissue regeneration of non-healing wounds includes pressure ulcers, ulcers associated with vascular insufficiency, surgical, and traumatic wounds.

[0732] Similarly, nerve and brain tissue could also be regenerated by using polynucleotides or polypeptides, as well as agonists or antagonists of the present invention, to proliferate and differentiate nerve cells. Diseases that could be treated using this method include central and peripheral nervous system diseases, neuropathies, or mechanical and traumatic disorders (e.g., spinal cord disorders, head trauma, cerebrovascular disease, and stoke). Specifically, diseases associated with peripheral nerve injuries, peripheral neuropathy (e.g., resulting from chemotherapy or other medical therapies), localized neuropathies, and central nervous system diseases (e.g., Alzheimer's disease, Parkinson's disease, Huntington's disease, amyotrophic lateral sclerosis, and Shy-Drager syndrome), could all be treated using the polynucleotides or polypeptides, as well as agonists or antagonists of the present invention.

### Chemotaxis

[0733] Polynucleotides or polypeptides, as well as agonists or antagonists of the present invention may have chemotaxis activity. A chemotaxic molecule attracts or mobilizes cells (e.g., monocytes, fibroblasts, neutrophils, T-cells, mast cells, eosinophils, epithelial and/or endothelial cells) to a particular site in the body, such as inflammation, infection, or site of hyperproliferation. The mobilized cells can then fight off and/or heal the particular trauma or abnormality.

[0734] Polynucleotides or polypeptides, as well as agonists or antagonists of the present invention may increase chemotaxic activity of particular cells. These chemotactic molecules can then be used to treat inflammation, infection, hyperproliferative disorders, or any immune system disorder by increasing the number of cells targeted to a particular location in the body. For example, chemotaxic molecules can be used to treat wounds and other trauma to tissues by attracting immune cells to the injured location. Chemotactic molecules of the present invention can also attract fibroblasts, which can be used to treat wounds.

[0735] It is also contemplated that polynucleotides or polypeptides, as well as agonists or antagonists of the present invention may inhibit chemotactic activity. These molecules could also be used to treat disorders. Thus, polynucleotides or polypeptides, as well as agonists or antagonists of the present invention could be used as an inhibitor of chemotaxis.

### Binding Activity

[0736] A polypeptide of the present invention may be used to screen for molecules that bind to the polypeptide or for molecules to which the polypeptide binds. The binding of the polypeptide and the molecule may activate (agonist), increase, inhibit (antagonist), or decrease activity of the polypeptide or the molecule bound. Examples of such molecules include antibodies, oligonucleotides, proteins (e.g., receptors),or small molecules.

[0737] Preferably, the molecule is closely related to the natural ligand of the polypeptide, e.g., a fragment of the ligand, or a natural substrate, a ligand, a structural or functional mimetic. (See, Coligan et al., Current Protocols in Immunology 1(2):Chapter 5 (1991).) Similarly, the molecule can be closely related to the natural receptor to which the polypeptide binds, or at least, a fragment of the receptor capable of being bound by the polypeptide (e.g., active site). In either case, the molecule can be rationally designed using known techniques.

[0738] Preferably, the screening for these molecules involves producing appropriate cells, which express the polypeptide. Preferred cells include cells from mammals, yeast, Drosophila, or E. Coli. Cells expressing the polypeptide (or cell membrane containing the expressed polypeptide) are then preferably contacted with a test compound potentially containing the molecule to observe binding, stimulation, or inhibition of activity of either the polypeptide or the molecule.

[0739] The assay may simply test binding of a candidate compound to the polypeptide, wherein binding is detected by a label, or in an assay involving competition with a labeled competitor. Further, the assay may test whether the candidate compound results in a signal generated by binding to the polypeptide.

[0740] Alternatively, the assay can be carried out using cell-free preparations, polypeptide/molecule affixed to a solid support, chemical libraries, or natural product mixtures. The assay may also simply comprise the steps of mixing a candidate compound with a solution containing a polypeptide, measuring polypeptide/molecule activity or binding, and comparing the polypeptide/molecule activity or binding to a standard.

[0741] Preferably, an ELISA assay can measure polypeptide level or activity in a sample (e.g., biological sample) using a monoclonal or polyclonal antibody. The antibody can measure polypeptide level or activity by either binding, directly or indirectly, to the polypeptide or by competing with the polypeptide for a substrate.

[0742] Additionally, the receptor to which the polypeptide of the present invention binds can be identified by numerous methods known to those of skill in the art, for example, ligand panning and FACS sorting (Coligan, et al., Current Protocols in Immun., 1(2), Chapter 5, (1991)). For example, expression cloning is employed wherein polyadenylated RNA is prepared from a cell responsive to the polypeptides, for example, NIH3T3 cells which are known to contain multiple receptors for the FGF family proteins, and SC-3 cells, and a cDNA library created from this RNA is divided into pools and used to transfect COS cells or other cells that are not responsive to the polypeptides. Transfected cells which are grown on glass slides are exposed to the polypeptide of the present invention, after they have been labeled. The polypeptides can be labeled by a variety of means including iodination or inclusion of a recognition site for a site-specific protein kinase.

[0743] Following fixation and incubation, the slides are subjected to auto-radiographic analysis. Positive pools are identified and sub-pools are prepared and re-transfected using an iterative sub-pooling and re-screening process, eventually yielding a single clones that encodes the putative receptor.

[0744] As an alternative approach for receptor identification, the labeled polypeptides can be photoaffinity linked with cell membrane or extract preparations that express the receptor molecule. Cross-linked material is resolved by PAGE analysis and exposed to X-ray film. The labeled complex containing the receptors of the polypeptides can be excised, resolved into peptide fragments, and subjected to protein microsequencing. The amino acid sequence obtained from microsequencing would be used to design a set of degenerate oligonucleotide probes to screen a cDNA library to identify the genes encoding the putative receptors.

[0745] Moreover, the techniques of gene-shuffling, motif-shuffling, exon-shuffling, and/or codon-shuffling (collectively referred to as “DNA shuffling”)may be employed to modulate the activities of the polypeptide of the present invention thereby effectively generating agonists and antagonists of the polypeptide of the present invention. See generally, U.S. Pat. Nos. 5,605,793, 5,811,238, 5,830,721, 5,834,252, and 5,837,458, and Patten, P. A., et al., Curr. Opinion Biotechnol. 8:724-33 (1997); Harayama, S. Trends Biotechnol. 16(2):76-82 (1998); Hansson L. O., et al., J. Mol. Biol. 287:265-76 (1999); and Lorenzo, M. M. and Blasco, R. Biotechniques 24(2):308-13 (1998); each of these patents and publications are hereby incorporated by reference). In one embodiment, alteration of polynucleotides and corresponding polypeptides may be achieved by DNA shuffling. DNA shuffling involves the assembly of two or more DNA segments into a desired molecule by homologous, or site-specific, recombination. In another embodiment, polynucleotides and corresponding polypeptides may be altered by being subjected to random mutagenesis by error-prone PCR, random nucleotide insertion or other methods prior to recombination. In another embodiment, one or more components, motifs, sections, parts, domains, fragments, etc., of the polypeptide of the present invention may be recombined with one or more components, motifs, sections, parts, domains, fragments, etc. of one or more heterologous molecules. In preferred embodiments, the heterologous molecules are family members. In further preferred embodiments, the heterologous molecule is a growth factor such as, for example, platelet-derived growth factor (PDGF), insulin-like growth factor (IGF-I), transforming growth factor (TGF)-alpha, epidermal growth factor (EGF), fibroblast growth factor (FGF), TGF-beta, bone morphogenetic protein (BMP)-2, BMP-4, BMP-5, BMP-6, BMP-7, activins A and B, decapentaplegic(dpp), 60A, OP-2, dorsalin, growth differentiation factors (GDFs), nodal, MIS, inhibin-alpha, TGF-betal, TGF-beta2, TGF-beta3, TGF-beta5, and glial-derived neurotrophic factor (GDNF).

[0746] Other preferred fragments are biologically active fragments of the polypeptide of the present invention. Biologically active fragments are those exhibiting activity similar, but not necessarily identical, to an activity of the polypeptide of the present invention. The biological activity of the fragments may include an improved desired activity, or a decreased undesirable activity.

[0747] Additionally, this invention provides a method of screening compounds to identify those, which modulate the action of the polypeptide of the present invention. An example of such an assay comprises combining a mammalian fibroblast cell, the polypeptide of the present invention, the compound to be screened and ³[H] thymidine under cell culture conditions where the fibroblast cell would normally proliferate. A control assay may be performed in the absence of the compound to be screened and compared to the amount of fibroblast proliferation in the presence of the compound to determine if the compound stimulates proliferation by determining the uptake of ³[H] thymidine in each case. The amount of fibroblast cell proliferation is measured by liquid scintillation chromatography, which measures the incorporation of ³[H] thymidine. Both agonist and antagonist compounds may be identified by this procedure.

[0748] In another method, a mammalian cell or membrane preparation expressing a receptor for a polypeptide of the present invention is incubated with a labeled polypeptide of the present invention in the presence of the compound. The ability of the compound to enhance or block this interaction could then be measured. Alternatively, the response of a known second messenger system following interaction of a compound to be screened and the receptor is measured and the ability of the compound to bind to the receptor and elicit a second messenger response is measured to determine if the compound is a potential agonist or antagonist. Such second messenger systems include but are not limited to, cAMP guanylate cyclase, ion channels or phosphoinositide hydrolysis.

[0749] All of these above assays can be used as diagnostic or prognostic markers. The molecules discovered using these assays can be used to treat disease or to bring about a particular result in a patient (e.g., blood vessel growth) by activating or inhibiting the polypeptide/molecule. Moreover, the assays can discover agents which may inhibit or enhance the production of the polypeptides of the invention from suitably manipulated cells or tissues.

[0750] Therefore, the invention includes a method of identifying compounds which bind to a polypeptide of the invention comprising the steps of: (a) incubating a candidate binding compound with a polypeptide of the present invention; and (b) determining if binding has occurred. Moreover, the invention includes a method of identifying agonists/antagonists comprising the steps of: (a) incubating a candidate compound with a polypeptide of the present invention, (b) assaying a biological activity, and (b) determining if a biological activity of the polypeptide has been altered.

### Targeted Delivery

[0751] In another embodiment, the invention provides a method of delivering compositions to targeted cells expressing a receptor for a polypeptide of the invention, or cells expressing a cell bound form of a polypeptide of the invention.

[0752] As discussed herein, polypeptides or antibodies of the invention may be associated with heterologous polypeptides, heterologous nucleic acids, toxins, or prodrugs via hydrophobic, hydrophilic, ionic and/or covalent interactions. In one embodiment, the invention provides a method for the specific delivery of compositions of the invention to cells by administering polypeptides of the invention (including antibodies) that are associated with heterologous polypeptides or nucleic acids. In one example, the invention provides a method for delivering a therapeutic protein into the targeted cell. In another example, the invention provides a method for delivering a single stranded nucleic acid (e.g., antisense or ribozymes) or double stranded nucleic acid (e.g., DNA that can integrate into the cell's genome or replicate episomally and that can be transcribed) into the targeted cell.

[0753] In another embodiment, the invention provides a method for the specific destruction of cells (e.g., the destruction of tumor cells) by administering polypeptides of the invention (e.g., polypeptides of the invention or antibodies of the invention) in association with toxins or cytotoxic prodrugs.

[0754] By “toxin” is meant compounds that bind and activate endogenous cytotoxic effector systems, radioisotopes, holotoxins, modified toxins, catalytic subunits of toxins, or any molecules or enzymes not normally present in or on the surface of a cell that under defined conditions cause the cell's death. Toxins that may be used according to the methods of the invention include, but are not limited to, radioisotopes known in the art, compounds such as, for example, antibodies (or complement fixing containing portions thereof) that bind an inherent or induced endogenous cytotoxic effector system, thymidine kinase, endonuclease, RNAse, alpha toxin, ricin, abrin, Pseudomonas exotoxin A, diphtheria toxin, saporin, momordin, gelonin, pokeweed antiviral protein, alpha-sarcin and cholera toxin. By “cytotoxic prodrug” is meant a non-toxic compound that is converted by an enzyme, normally present in the cell, into a cytotoxic compound. Cytotoxic prodrugs that may be used according to the methods of the invention include, but are not limited to, glutamyl derivatives of benzoic acid mustard alkylating agent, phosphate derivatives of etoposide or mitomycin C, cytosine arabinoside, daunorubisin, and phenoxyacetamide derivatives of doxorubicin.

### Drug Screening

[0755] Further contemplated is the use of the polypeptides of the present invention, or the polynucleotides encoding these polypeptides, to screen for molecules, which modify the activities of the polypeptides of the present invention. Such a method would include contacting the polypeptide of the present invention with a selected compound(s) suspected of having antagonist or agonist activity, and assaying the activity of these polypeptides following binding.

[0756] This invention is particularly useful for screening therapeutic compounds by using the polypeptides of the present invention, or binding fragments thereof, in any of a variety of drug screening techniques. The polypeptide or fragment employed in such a test may be affixed to a solid support, expressed on a cell surface, free in solution, or located intracellularly. One method of drug screening utilizes eukaryotic or prokaryotic host cells which are stably transformed with recombinant nucleic acids expressing the polypeptide or fragment. Drugs are screened against such transformed cells in competitive binding assays. One may measure, for example, the formulation of complexes between the agent being tested and a polypeptide of the present invention.

[0757] Thus, the present invention provides methods of screening for drugs or any other agents, which affect activities mediated by the polypeptides of the present invention. These methods comprise contacting such an agent with a polypeptide of the present invention or a fragment thereof and assaying for the presence of a complex between the agent and the polypeptide or a fragment thereof, by methods well known in the art. In such a competitive binding assay, the agents to screen are typically labeled. Following incubation, free agent is separated from that present in bound form, and the amount of free or uncomplexed label is a measure of the ability of a particular agent to bind to the polypeptides of the present invention.

[0758] Another technique for drug screening provides high throughput screening for compounds having suitable binding affinity to the polypeptides of the present invention, and is described in great detail in European Patent Application 84/03564, published on Sep. 13, 1984, which is incorporated herein by reference herein. Briefly stated, large numbers of different small peptide test compounds are synthesized on a solid substrate, such as plastic pins or some other surface. The peptide test compounds are reacted with polypeptides of the present invention and washed. Bound polypeptides are then detected by methods well known in the art. Purified polypeptides are coated directly onto plates for use in the aforementioned drug screening techniques. In addition, non-neutralizing antibodies may be used to capture the peptide and immobilize it on the solid support.

[0759] This invention also contemplates the use of competitive drug screening assays in which neutralizing antibodies capable of binding polypeptides of the present invention specifically compete with a test compound for binding to the polypeptides or fragments thereof. In this manner, the antibodies are used to detect the presence of any peptide which shares one or more antigenic epitopes with a polypeptide of the invention.

### Antisense And Ribozyme (Antagonists)

[0760] In specific embodiments, antagonists according to the present invention are nucleic acids corresponding to the sequences contained in SEQ ID NO:X, or the complementary strand thereof, and/or to cDNA sequences contained in cDNA Clone ID NO:Z identified for example, in Table 1A. In one embodiment, antisense sequence is generated internally, by the organism, in another embodiment, the antisense sequence is separately administered (see, for example, O'Connor, J., Neurochem. 56:560 (1991). Oligodeoxynucleotides as Antisense Inhibitors of Gene Expression, CRC Press, Boca Raton, Fla. (1988). Antisense technology can be used to control gene expression through antisense DNA or RNA, or through triple-helix formation. Antisense techniques are discussed for example, in Okano, J., Neurochem. 56:560 (1991); Oligodeoxynucleotides as Antisense Inhibitors of Gene Expression, CRC Press, Boca Raton, Fla. (1988). Triple helix formation is discussed in, for instance, Lee et al., Nucleic Acids Research 6:3073 (1979); Cooney et al., Science 241:456 (1988); and Dervan et al., Science 251:1300 (1991). The methods are based on binding of a polynucleotide to a complementary DNA or RNA.

[0761] For example, the use of c-myc and c-myb antisense RNA constructs to inhibit the growth of the non-lymphocytic leukemia cell line HL-60 and other cell lines was previously described. (Wickstrom et al. (1988); Anfossi et al. (1989)). These experiments were performed in vitro by incubating cells with the oligoribonucleotide. A similar procedure for in vivo use is described in WO 91/15580. Briefly, a pair of oligonucleotides for a given antisense RNA is produced as follows: A sequence complimentary to the first 15 bases of the open reading frame is flanked by an EcoRl site on the 5′ end and a HindIII site on the 3′ end. Next, the pair of oligonucleotides is heated at 90° C. for one minute and then annealed in 2× ligation buffer (20 mM TRIS HCl pH 7.5, 10 mM MgCl2, 10 MM dithiothreitol (DTT) and 0.2 mM ATP) and then ligated to the EcoRl/Hind III site of the retroviral vector PMV7 (WO 91/15580).

[0762] For example, the 5′ coding portion of a polynucleotide that encodes the polypeptide of the present invention may be used to design an antisense RNA oligonucleotide of from about 10 to 40 base pairs in length. A DNA oligonucleotide is designed to be complementary to a region of the gene involved in transcription thereby preventing transcription and the production of the receptor. The antisense RNA oligonucleotide hybridizes to the mRNA in vivo and blocks translation of the mRNA molecule into receptor polypeptide.

[0763] In one embodiment, the antisense nucleic acid of the invention is produced intracellularly by transcription from an exogenous sequence. For example, a vector or a portion thereof, is transcribed, producing an antisense nucleic acid (RNA) of the invention. Such a vector would contain a sequence encoding the antisense nucleic acid. Such a vector can remain episomal or become chromosomally integrated, as long as it can be transcribed to produce the desired antisense RNA. Such vectors can be constructed by recombinant DNA technology methods standard in the art. Vectors can be plasmid, viral, or others known in the art, used for replication and expression in vertebrate cells. Expression of the sequence encoding the polypeptide of the present invention or fragments thereof, can be by any promoter known in the art to act in vertebrate, preferably human cells. Such promoters can be inducible or constitutive. Such promoters include, but are not limited to, the SV40 early promoter region (Bemoist and Chambon, Nature 29:304-310 (1981), the promoter contained in the 3′ long terminal repeat of Rous sarcoma virus (Yamamoto et al., Cell 22:787-797 (1980), the herpes thymidine promoter (Wagner et al., Proc. Natl. Acad. Sci. U.S.A. 78:1441-1445 (1981), the regulatory sequences of the metallothionein gene (Brinster, et al., Nature 296:39-42 (1982)), etc.

[0764] The antisense nucleic acids of the invention comprise a sequence complementary to at least a portion of an RNA transcript of a gene of the present invention. However, absolute complementarity, although preferred, is not required. A sequence “complementary to at least a portion of an RNA,” referred to herein, means a sequence having sufficient complementarity to be able to hybridize with the RNA, forming a stable duplex; in the case of double stranded antisense nucleic acids, a single strand of the duplex DNA may thus be tested, or triplex formation may be assayed. The ability to hybridize will depend on both the degree of complementarity and the length of the antisense nucleic acid. Generally, the larger the hybridizing nucleic acid, the more base mismatches with a RNA it may contain and still form a stable duplex (or triplex as the case may be). One skilled in the art can ascertain a tolerable degree of mismatch by use of standard procedures to determine the melting point of the hybridized complex.

[0765] Oligonucleotides that are complementary to the 5′ end of the message, e.g., the 5′ untranslated sequence up to and including the AUG initiation codon, should work most efficiently at inhibiting translation. However, sequences complementary to the 3′ untranslated sequences of mRNAs have been shown to be effective at inhibiting translation of mRNAs as well. See generally, Wagner, R., 1994, Nature 372:333-335. Thus, oligonucleotides complementary to either the 5′- or 3′-non-translated, non-coding regions of polynucleotide sequences described herein could be used in an antisense approach to inhibit translation of endogenous mRNA. Oligonucleotides complementary to the 5′ untranslated region of the mRNA should include the complement of the AUG start codon. Antisense oligonucleotides complementary to mRNA coding regions are less efficient inhibitors of translation but could be used in accordance with the invention. Whether designed to hybridize to the 5′-, 3′- or coding region of mRNA of the present invention, antisense nucleic acids should be at least six nucleotides in length, and are preferably oligonucleotides ranging from 6 to about 50 nucleotides in length. In specific aspects the oligonucleotide is at least 10 nucleotides, at least 17 nucleotides, at least 25 nucleotides or at least 50 nucleotides.

[0766] The polynucleotides of the invention can be DNA or RNA or chimeric mixtures or derivatives or modified versions thereof, single-stranded or double-stranded. The oligonucleotide can be modified at the base moiety, sugar moiety, or phosphate backbone, for example, to improve stability of the molecule, hybridization, etc. The oligonucleotide may include other appended groups such as peptides (e.g., for targeting host cell receptors in vivo), or agents facilitating transport across the cell membrane (see, e.g., Letsinger et al., 1989, Proc. Natl. Acad. Sci. U.S.A. 86:6553-6556; Lemaitre et al., 1987, Proc. Natl. Acad. Sci. 84:648-652; PCT Publication No. WO88/09810, published Dec. 15, 1988) or the blood-brain barrier (see, e.g., PCT Publication No. WO89/10134, published Apr. 25, 1988), hybridization-triggered cleavage agents. (See, e.g., Krol et al., 1988, BioTechniques 6:958-976) or intercalating agents. (See, e.g., Zon, 1988, Pharm. Res. 5:539-549). To this end, the oligonucleotide may be conjugated to another molecule, e.g., a peptide, hybridization triggered cross-linking agent, transport agent, hybridization-triggered cleavage agent, etc.

[0767] The antisense oligonucleotide may comprise at least one modified base moiety which is selected from the group including, but not limited to, 5-fluorouracil, 5-bromouracil, 5-chlorouracil, 5-iodouracil, hypoxanthine, xantine, 4-acetylcytosine, 5-(carboxyhydroxylmethyl) uracil, 5-carboxymethylaminomethyl-2-thiouridine, 5-carboxymethylaminomethyluracil, dihydrouracil, beta-D-galactosylqueosine, inosine, N 6-isopentenyladenine, 1-methylguanine, 1-methylinosine, 2,2-dimethylguanine, 2-methyladenine, 2-methylguanine, 3-methylcytosine, 5-methylcytosine, N6-adenine, 7-methylguanine, 5-methylaminomethyluracil, 5-methoxyaminomethyl-2-thiouracil, beta-D-mannosylqueosine, 5′-methoxycarboxymethyluracil, 5-methoxyuracil, 2-methylthio-N6-isopentenyladenine, uracil-5-oxyacetic acid (v), wybutoxosine, pseudouracil, queosine, 2-thiocytosine, 5-methyl-2-thiouracil, 2-thiouracil, 4-thiouracil, 5-methyluracil, uracil-5-oxyacetic acid methylester, uracil-5-oxyacetic acid (v), 5-methyl-2-thiouracil, 3-(3-amino-3-N-2-carboxypropyl) uracil, (acp3)w, and 2,6-diaminopurine.

[0768] The antisense oligonucleotide may also comprise at least one modified sugar moiety selected from the group including, but not limited to, arabinose, 2-fluoroarabinose, xylulose, and hexose.

[0769] In yet another embodiment, the antisense oligonucleotide comprises at least one modified phosphate backbone selected from the group including, but not limited to, a phosphorothioate, a phosphorodithioate, a phosphoramidothioate, a phosphoramidate, a phosphordiamidate, a methylphosphonate, an alkyl phosphotriester, and a formacetal or analog thereof.

[0770] In yet another embodiment, the antisense oligonucleotide is an a-anomeric oligonucleotide. An a-anomeric oligonucleotide forms specific double-stranded hybrids with complementary RNA in which, contrary to the usual b-units, the strands run parallel to each other (Gautier et al., 1987, Nucl. Acids Res. 15:6625-6641). The oligonucleotide is a 2′-0-methylribonucleotide (Inoue et al., 1987, Nucl. Acids Res. 15:6131-6148), or a chimeric RNA-DNA analogue (Inoue et al., 1987, FEBS Lett. 215:327-330).

[0771] Polynucleotides of the invention may be synthesized by standard methods known in the art, e.g. by use of an automated DNA synthesizer (such as are commercially available from Biosearch, Applied Biosystems, etc.). As examples, phosphorothioate oligonucleotides may be synthesized by the method of Stein et al. (1988, Nucl. Acids Res. 16:3209), methylphosphonate oligonucleotides can be prepared by use of controlled pore glass polymer supports (Sarin et al., 1988, Proc. Natl. Acad. Sci. U.S.A. 85:7448-7451), etc.

[0772] While antisense nucleotides complementary to the coding region sequence could be used, those complementary to the transcribed untranslated region are most preferred.

[0773] Potential antagonists according to the invention also include catalytic RNA, or a ribozyme (See, e.g., PCT International Publication WO 90/11364, published Oct. 4, 1990; Sarver et al, Science 247:1222-1225 (1990). While ribozymes that cleave mRNA at site specific recognition sequences can be used to destroy mRNAs, the use of hammerhead ribozymes is preferred. Hammerhead ribozymes cleave mRNAs at locations dictated by flanking regions that form complementary base pairs with the target mRNA. The sole requirement is that the target mRNA have the following sequence of two bases: 5′-UG-3′. The construction and production of hammerhead ribozymes is well known in the art and is described more fully in Haseloff and Gerlach, Nature 334:585-591 (1988). There are numerous potential hammerhead ribozyme cleavage sites within the nucleotide sequence of SEQ ID NO:X. Preferably, the ribozyme is engineered so that the cleavage recognition site is located near the 5′ end of the mRNA; i.e., to increase efficiency and minimize the intracellular accumulation of non-functional mRNA transcripts.

[0774] As in the antisense approach, the ribozymes of the invention can be composed of modified oligonucleotides (e.g. for improved stability, targeting, etc.) and should be delivered to cells which express in vivo. DNA constructs encoding the ribozyme may be introduced into the cell in the same manner as described above for the introduction of antisense encoding DNA. A preferred method of delivery involves using a DNA construct “encoding” the ribozyme under the control of a strong constitutive promoter, such as, for example, pol III or pol II promoter, so that transfected cells will produce sufficient quantities of the ribozyme to destroy endogenous messages and inhibit translation. Since ribozymes unlike antisense molecules, are catalytic, a lower intracellular concentration is required for efficiency.

[0775] Antagonist/agonist compounds may be employed to inhibit the cell growth and proliferation effects of the polypeptides of the present invention on neoplastic cells and tissues, i.e. stimulation of angiogenesis of tumors, and, therefore, retard or prevent abnormal cellular growth and proliferation, for example, in tumor formation or growth.

[0776] The antagonist/agonist may also be employed to prevent hyper-vascular diseases, and prevent the proliferation of epithelial lens cells after extracapsular cataract surgery. Prevention of the mitogenic activity of the polypeptides of the present invention may also be desirous in cases such as restenosis after balloon angioplasty.

[0777] The antagonist/agonist may also be employed to prevent the growth of scar tissue during wound healing.

[0778] The antagonist/agonist may also be employed to treat the diseases described herein.

[0779] Thus, the invention provides a method of treating disorders or diseases, including but not limited to the disorders or diseases listed throughout this application, associated with overexpression of a polynucleotide of the present invention by administering to a patient (a) an antisense molecule directed to the polynucleotide of the present invention, and/or (b) a ribozyme directed to the polynucleotide of the present invention.

### Binding Peptides and Other Molecules

[0780] The invention also encompasses screening methods for identifying polypeptides and nonpolypeptides that bind liver antigen polypeptides, and the liver antigen binding molecules identified thereby. These binding molecules are useful, for example, as agonists and antagonists of the liver antigen polypeptides. Such agonists and antagonists can be used, in accordance with the invention, in the therapeutic embodiments described in detail, below.

[0781] This method comprises the steps of:

[0782] contacting liver antigen polypeptides or liver antigen-like polypeptides with a plurality of molecules; and

[0783] identifying a molecule that binds the liver antigen polypeptides or liver antigen-like polypeptides.

[0784] The step of contacting the liver antigen polypeptides or liver antigen-like polypeptides with the plurality of molecules may be effected in a number of ways. For example, one may contemplate immobilizing the liver antigen polypeptides or liver antigen-like polypeptides on a solid support and bringing a solution of the plurality of molecules in contact with the immobilized liver antigen polypeptides or liver antigen-like polypeptides. Such a procedure would be akin to an affinity chromatographic process, with the affinity matrix being comprised of the immobilized liver antigen polypeptides or liver antigen-like polypeptides. The molecules having a selective affinity for the liver antigen polypeptides or liver antigen-like polypeptides can then be purified by affinity selection. The nature of the solid support, process for attachment of the liver antigen polypeptides or liver antigen-like polypeptides to the solid support, solvent, and conditions of the affinity isolation or selection are largely conventional and well known to those of ordinary skill in the art.

[0785] Alternatively, one may also separate a plurality of polypeptides into substantially separate fractions comprising a subset of or individual polypeptides. For instance, one can separate the plurality of polypeptides by gel electrophoresis, column chromatography, or like method known to those of ordinary skill for the separation of polypeptides. The individual polypeptides can also be produced by a transformed host cell in such a way as to be expressed on or about its outer surface (e.g., a recombinant phage). Individual isolates can then be “probed” by the liver antigen polypeptides or liver antigen-like polypeptides, optionally in the presence of an inducer should one be required for expression, to determine if any selective affinity interaction takes place between the liver antigen polypeptides or liver antigen-like polypeptides and the individual clone. Prior to contacting the liver antigen polypeptides or liver antigen-like polypeptides with each fraction comprising individual polypeptides, the polypeptides could first be transferred to a solid support for additional convenience. Such a solid support may simply be a piece of filter membrane, such as one made of nitrocellulose or nylon. In this manner, positive clones could be identified from a collection of transformed host cells of an expression library, which harbor a DNA construct encoding a polypeptide having a selective affinity for liver antigen polypeptides or liver antigen-like polypeptides. Furthermore, the amino acid sequence of the polypeptide having a selective affinity for the liver antigen polypeptides or liver antigen-like polypeptides can be determined directly by conventional means or the coding sequence of the DNA encoding the polypeptide can frequently be determined more conveniently. The primary sequence can then be deduced from the corresponding DNA sequence. If the amino acid sequence is to be determined from the polypeptide itself, one may use microsequencing techniques. The sequencing technique may include mass spectroscopy.

[0786] In certain situations, it may be desirable to wash away any unbound liver antigen polypeptides or liver antigen-like polypeptides, or alternatively, unbound polypeptides, from a mixture of the liver antigen polypeptides or liver antigen-like polypeptides and the plurality of polypeptides prior to attempting to determine or to detect the presence of a selective affinity interaction. Such a wash step may be particularly desirable when the liver antigen polypeptides or liver antigen-like polypeptides or the plurality of polypeptides is bound to a solid support.

[0787] The plurality of molecules provided according to this method may be provided by way of diversity libraries, such as random or combinatorial peptide or nonpeptide libraries which can be screened for molecules that specifically bind liver antigen polypeptides. Many libraries are known in the art that can be used, e.g., chemically synthesized libraries, recombinant (e.g., phage display libraries), and in vitro translation-based libraries. Examples of chemically synthesized libraries are described in Fodor et al., 1991, Science 251:767-773; Houghten et al., 1991, Nature 354:84-86; Lam et al., 1991, Nature 354:82-84; Medynski, 1994, Bio/Technology 12:709-710;Gallop et al., 1994, J. Medicinal Chemistry 37(9):1233-1251; Ohlmeyer et al., 1993, Proc. Natl. Acad. Sci. USA 90:10922-10926; Erb et al., 1994, Proc. Natl. Acad. Sci. USA 91:11422-11426; Houghten et al., 1992, Biotechniques 13:412; Jayawickreme et al., 1994, Proc. Natl. Acad. Sci. USA 91:1614-1618; Salmon et al., 1993; Proc. Natl. Acad. Sci. USA 90:11708-11712; PCT Publication No. WO 93/20242; and Brenner and Lemer, 1992, Proc. Natl. Acad. Sci. USA 89:5381-5383.

[0788] Examples of phage display libraries are described in Scott and Smith, 1990, Science 249:386-390; Devlin et al., 1990, Science, 249:404-406; Christian, R. B., et al., 1992, J. Mol. Biol. 227:711-718); Lenstra, 1992, J. Immunol. Meth. 152:149-157; Kay et al., 1993, Gene 128:59-65; and PCT Publication No. WO 94/18318 dated Aug. 18, 1994.

[0789] In vitro translation-based libraries include but are not limited to those described in PCT Publication No. WO 91/05058 dated Apr. 18, 1991; and Mattheakis et al., 1994, Proc. Natl. Acad. Sci. USA 91:9022-9026.

[0790] By way of examples of nonpeptide libraries, a benzodiazepine library (see e.g., Bunin et al., 1994, Proc. Natl. Acad. Sci. USA 91:4708-4712) can be adapted for use. Peptoid libraries (Simon et al., 1992, Proc. Natl. Acad. Sci. USA 89:9367-9371) can also be used. Another example of a library that can be used, in which the amide functionalities in peptides have been permethylated to generate a chemically transformed combinatorial library, is described by Ostresh et al. (1994, Proc. Natl. Acad. Sci. USA 91:11138-11142).

[0791] The variety of non-peptide libraries that are useful in the present invention is great. For example, Ecker and Crooke, 1995, Bio/Technology 13:351-360 list benzodiazepines, hydantoins, piperazinediones, biphenyls, sugar analogs, beta-mercaptoketones, arylacetic acids, acylpiperidines, benzopyrans, cubanes, xanthines, aminimides, and oxazolones as among the chemical species that form the basis of various libraries.

[0792] Non-peptide libraries can be classified broadly into two types: decorated monomers and oligomers. Decorated monomer libraries employ a relatively simple scaffold structure upon which a variety functional groups is added. Often the scaffold will be a molecule with a known useful pharmacological activity. For example, the scaffold might be the benzodiazepine structure.

[0793] Non-peptide oligomer libraries utilize a large number of monomers that are assembled together in ways that create new shapes that depend on the order of the monomers. Among the monomer units that have been used are carbamates, pyrrolinones, and morpholinos. Peptoids, peptide-like oligomers in which the side chain is attached to the alpha amino group rather than the alpha carbon, form the basis of another version of non-peptide oligomer libraries. The first non-peptide oligomer libraries utilized a single type of monomer and thus contained a repeating backbone. Recent libraries have utilized more than one monomer, giving the libraries added flexibility.

[0794] Screening the libraries can be accomplished by any of a variety of commonly known methods. See, e.g., the following references, which disclose screening of peptide libraries: Parmley and Smith, 1989, Adv. Exp. Med. Biol. 251:215-218; Scott and Smith, 1990, Science 249:386-390; Fowlkes et al., 1992; BioTechniques 13:422-427; Oldenburg et al., 1992, Proc. Natl. Acad. Sci. USA 89:5393-5397; Yu et al., 1994, Cell 76:933-945; Staudt et al., 1988, Science 241:577-580; Bock et al., 1992, Nature 355:564-566; Tuerk et al., 1992, Proc. Natl. Acad. Sci. USA 89:6988-6992; Ellington et al., 1992, Nature 355:850-852; U.S. Pat. No. 5,096,815, U.S. Pat. No. 5,223,409, and U.S. Pat. No. 5,198,346, all to Ladner et al.; Rebar and Pabo, 1993, Science 263:671-673; and CT Publication No. WO 94/18318.

[0795] In a specific embodiment, screening to identify a molecule that binds liver antigen polypeptides can be carried out by contacting the library members with a liver antigen polypeptides or liver antigen-like polypeptides immobilized on a solid phase and harvesting those library members that bind to the liver antigen polypeptides or liver antigen-like polypeptides. Examples of such screening methods, termed “panning” techniques are described by way of example in Parmley and Smith, 1988, Gene 73:305-318; Fowlkes et al., 1992, BioTechniques 13:422-427; International Publication No. WO 94/18318; and in references cited herein.

[0796] In another embodiment, the two-hybrid system for selecting interacting proteins in yeast (Fields and Song, 1989, Nature 340:245-246; Chien et al., 1991, Proc. Natl. Acad. Sci. USA 88:9578-9582) can be used to identify molecules that specifically bind to liver antigen polypeptides or liver antigen-like polypeptides.

[0797] Where the liver antigen binding molecule is a polypeptide, the polypeptide can be conveniently selected from any peptide library, including random peptide libraries, combinatorial peptide libraries, or biased peptide libraries. The term “biased” is used herein to mean that the method of generating the library is manipulated so as to restrict one or more parameters that govern the diversity of the resulting collection of molecules, in this case peptides.

[0798] Thus, a truly random peptide library would generate a collection of peptides in which the probability of finding a particular amino acid at a given position of the peptide is the same for all 20 amino acids. A bias can be introduced into the library, however, by specifying, for example, that a lysine occurs every fifth amino acid or that positions 4, 8, and 9 of a decapeptide library be fixed to include only arginine. Clearly, many types of biases can be contemplated, and the present invention is not restricted to any particular bias. Furthermore, the present invention contemplates specific types of peptide libraries, such as phage displayed peptide libraries and those that utilize a DNA construct comprising a lambda phage vector with a DNA insert.

[0799] As mentioned above, in the case of a liver antigen binding molecule that is a polypeptide, the polypeptide may have about 6 to less than about 60 amino acid residues, preferably about 6 to about 10 amino acid residues, and most preferably, about 6 to about 22 amino acids. In another embodiment, a liver antigen binding polypeptide has in the range of 15-100 amino acids, or 20-50 amino acids.

[0800] The selected liver antigen binding polypeptide can be obtained by chemical synthesis or recombinant expression.

### Other Activities

[0801] A polypeptide, polynucleotide, agonist, or antagonist of the present invention, as a result of the ability to stimulate vascular endothelial cell growth, may be employed in treatment for stimulating re-vascularization of ischemic tissues due to various disease conditions such as thrombosis, arteriosclerosis, and other cardiovascular conditions. The polypeptide, polynucleotide, agonist, or antagonist of the present invention may also be employed to stimulate angiogenesis and limb regeneration, as discussed above.

[0802] A polypeptide, polynucleotide, agonist, or antagonist of the present invention may also be employed for treating wounds due to injuries, bums, post-operative tissue repair, and ulcers since they are mitogenic to various cells of different origins, such as fibroblast cells and skeletal muscle cells, and therefore, facilitate the repair or replacement of damaged or diseased tissue.

[0803] A polypeptide, polynucleotide, agonist, or antagonist of the present invention may also be employed to stimulate neuronal growth and to treat and prevent neuronal damage which occurs in certain neuronal disorders or neuro-degenerative conditions such as Alzheimer's disease, Parkinson's disease, and AIDS-related complex. A polypeptide, polynucleotide, agonist, or antagonist of the present invention may have the ability to stimulate chondrocyte growth; therefore, they may be employed to enhance bone and periodontal regeneration and aid in tissue transplants or bone grafts.

[0804] A polypeptide, polynucleotide, agonist, or antagonist of the present invention may be also employed to prevent skin aging due to sunburn by stimulating keratinocyte growth.

[0805] A polypeptide, polynucleotide, agonist, or antagonist of the present invention may also be employed for preventing hair loss, since FGF family members. activate hair-forming cells and promotes melanocyte growth. Along the same lines, a polypeptide, polynucleotide, agonist, or antagonist of the present invention may be employed to stimulate growth and differentiation of hematopoietic cells and bone marrow cells when used in combination with other cytokines.

[0806] A polypeptide, polynucleotide, agonist, or antagonist of the present invention may also be employed to maintain organs before transplantation or for supporting cell culture of primary tissues. A polypeptide, polynucleotide, agonist, or antagonist of the present invention may also be employed for inducing tissue of mesodermal origin to differentiate in early embryos.

[0807] A polypeptide, polynucleotide, agonist, or antagonist of the present invention may also increase or decrease the differentiation or proliferation of embryonic stem cells, besides, as discussed above, hematopoietic lineage.

[0808] A polypeptide, polynucleotide, agonist, or antagonist of the present invention may also be used to modulate mammalian characteristics, such as body height, weight, hair color, eye color, skin, percentage of adipose tissue, pigmentation, size, and shape (e.g., cosmetic surgery). Similarly, a polypeptide, polynucleotide, agonist, or antagonist of the present invention may be used to modulate mammalian metabolism affecting catabolism, anabolism, processing, utilization, and storage of energy.

[0809] A polypeptide, polynucleotide, agonist, or antagonist of the present invention may be used to change a mammal's mental state or physical state by influencing biorhythms, caricadic rhythms, depression (including depressive disorders), tendency for violence, tolerance for pain, reproductive capabilities (preferably by Activin or Inhibin-like activity), hormonal or endocrine levels, appetite, libido, memory, stress, or other cognitive qualities.

[0810] A polypeptide, polynucleotide, agonist, or antagonist of the present invention may also be used as a food additive or preservative, such as to increase or decrease storage capabilities, fat content, lipid, protein, carbohydrate, vitamins, minerals, cofactors or other nutritional components.

[0811] The above-recited applications have uses in a wide variety of hosts. Such hosts include, but are not limited to, human, murine, rabbit, goat, guinea pig, camel, horse, mouse, rat, hamster, pig, micro-pig, chicken, goat, cow, sheep, dog, cat, non-human primate, and human. In specific embodiments, the host is a mouse, rabbit, goat, guinea pig, chicken, rat, hamster, pig, sheep, dog or cat. In preferred embodiments, the host is a mammal. In most preferred embodiments, the host is a human.

### Other Preferred Embodiments

[0812] Other preferred embodiments of the claimed invention include an isolated nucleic acid molecule comprising a nucleotide sequence which is at least 95% identical to a sequence of at least about 50 contiguous nucleotides in the nucleotide sequence of SEQ ID NO:X or the complementary strand thereto, the nucleotide sequence as defined in column 4 of Table 1A or columns 8 and 9 of Table 2 or the complementary strand thereto, and/or cDNA contained in Clone ID NO:Z.

[0813] Also preferred is a nucleic acid molecule wherein said sequence of contiguous nucleotides is included in the nucleotide sequence of the portion of SEQ ID NO:X as defined in column 4, “ORF (From-To)”, in Table 1A.

[0814] Also preferred is a nucleic acid molecule wherein said sequence of contiguous nucleotides is included in the nucleotide sequence of the portion of SEQ ID NO:X as defined in columns 8 and 9, “NT From” and “NT To” respectively, in Table 2.

[0815] Also preferred is an isolated nucleic acid molecule comprising a nucleotide sequence which is at least 95% identical to a sequence of at least about 150 contiguous nucleotides in the nucleotide sequence of SEQ ID NO:X or the complementary strand thereto, the nucleotide sequence as defined in column 4 of Table 1A or columns 8 and 9 of Table 2 or the complementary strand thereto, and/or cDNA contained in Clone ID NO:Z.

[0816] Further preferred is an isolated nucleic acid molecule comprising a nucleotide sequence which is at least 95% identical to a sequence of at least about 500 contiguous nucleotides in the nucleotide sequence of SEQ ID NO:X or the complementary strand thereto, the nucleotide sequence as defined in column 4 of Table 1A or columns 8 and 9 of Table 2 or the complementary strand thereto, and/or cDNA contained in Clone ID NO:Z.

[0817] A further preferred embodiment is a nucleic acid molecule comprising a nucleotide sequence which is at least 95% identical to the nucleotide sequence of the portion of SEQ ID NO:X defined in column 4, “ORF (From-To)”, in Table 1A.

[0818] A further preferred embodiment is a nucleic acid molecule comprising a nucleotide sequence which is at least 95% identical to the nucleotide sequence of the portion of SEQ ID NO:X defined in columns 8 and 9, “NT From” and “NT To”, respectively, in Table 2.

[0819] A further preferred embodiment is an isolated nucleic acid molecule comprising a nucleotide sequence which is at least 95% identical to the complete nucleotide sequence of SEQ ID NO:X or the complementary strand thereto, the nucleotide sequence as defined in column 4 of Table 1A or columns 8 and 9 of Table 2 or the complementary strand thereto, and/or cDNA contained in Clone ID NO:Z.

[0820] Also preferred is an isolated nucleic acid molecule which hybridizes under stringent hybridization conditions to a nucleic acid molecule comprising a nucleotide sequence of SEQ ID NO:X or the complementary strand thereto, the nucleotide sequence as defined in column 4 of Table 1A or columns 8 and 9 of Table 2 or the complementary strand thereto, and/or cDNA contained in Clone ID NO:Z, wherein said nucleic acid molecule which hybridizes does not hybridize under stringent hybridization conditions to a nucleic acid molecule having a nucleotide sequence consisting of only A residues or of only T residues.

[0821] Also preferred is a composition of matter comprising a DNA molecule which comprises the cDNA contained in Clone ID NO:Z.

[0822] Also preferred is an isolated nucleic acid molecule comprising a nucleotide sequence which is at least 95% identical to a sequence of at least 50 contiguous nucleotides of the cDNA sequence contained in Clone ID NO:Z.

[0823] Also preferred is an isolated nucleic acid molecule, wherein said sequence of at least 50 contiguous nucleotides is included in the nucleotide sequence of an open reading frame sequence encoded by cDNA contained in Clone ID NO:Z.

[0824] Also preferred is an isolated nucleic acid molecule comprising a nucleotide sequence which is at least 95% identical to sequence of at least 150 contiguous nucleotides in the nucleotide sequence encoded by cDNA contained in Clone ID NO:Z.

[0825] A further preferred embodiment is an isolated nucleic acid molecule comprising a nucleotide sequence which is at least 95% identical to sequence of at least 500 contiguous nucleotides in the nucleotide sequence encoded by cDNA contained in Clone ID NO:Z.

[0826] A further preferred embodiment is an isolated nucleic acid molecule comprising a nucleotide sequence which is at least 95% identical to the complete nucleotide sequence encoded by cDNA contained in Clone ID NO:Z.

[0827] A further preferred embodiment is a method for detecting in a biological sample a nucleic acid molecule comprising a nucleotide sequence which is at least 95% identical to a sequence of at least 50 contiguous nucleotides in a sequence selected from the group consisting of: a nucleotide sequence of SEQ ID NO:X or the complementary strand thereto; the nucleotide sequence as defined in column 4 of Table 1A or columns 8 and 9 of Table 2 or the complementary strand thereto; and a nucleotide sequence encoded by cDNA contained in Clone ID NO:Z; which method comprises a step of comparing a nucleotide sequence of at least one nucleic acid molecule in said sample with a sequence selected from said group and determining whether the sequence of said nucleic acid molecule in said sample is at least 95% identical to said selected sequence.

[0828] Also preferred is the above method wherein said step of comparing sequences comprises determining the extent of nucleic acid hybridization between nucleic acid molecules in said sample and a nucleic acid molecule comprising said sequence selected from said group. Similarly, also preferred is the above method wherein said step of comparing sequences is performed by comparing the nucleotide sequence determined from a nucleic acid molecule in said sample with said sequence selected from said group. The nucleic acid molecules can comprise DNA molecules or RNA molecules.

[0829] A further preferred embodiment is a method for identifying the species, tissue or cell type of a biological sample which method comprises a step of detecting nucleic acid molecules in said sample, if any, comprising a nucleotide sequence that is at least 95% identical to a sequence of at least 50 contiguous nucleotides in a sequence selected from the group consisting of: a nucleotide sequence of SEQ ID NO:X or the complementary strand thereto; the nucleotide sequence as defined in column 4 of Table 1A or columns 8 and 9 of Table 2 or the complementary strand thereto; and a nucleotide sequence of the cDNA contained in Clone ID NO:Z.

[0830] The method for identifying the species, tissue or cell type of a biological sample can comprise a step of detecting nucleic acid molecules comprising a nucleotide sequence in a panel of at least two nucleotide sequences, wherein at least one sequence in said panel is at least 95% identical to a sequence of at least 50 contiguous nucleotides in a sequence selected from said group.

[0831] Also preferred is a method for diagnosing in a subject a pathological condition associated with abnormal structure or expression of a nucleotide sequence of SEQ ID NO:X or the complementary strand thereto; the nucleotide sequence as defined in column 4 of Table 1A or columns 8 and 9 of Table 2 or the complementary strand thereto; or the cDNA contained in Clone ID NO:Z which encodes a protein, wherein the method comprises a step of detecting in a biological sample obtained from said subject nucleic acid molecules, if any, comprising a nucleotide sequence that is at least 95% identical to a sequence of at least 50 contiguous nucleotides in a sequence selected from the group consisting of: a nucleotide sequence of SEQ ID NO:X or the complementary strand thereto; the nucleotide sequence as defined in column 4 of Table 1A or columns 8 and 9 of Table 2 or the complementary strand thereto; and a nucleotide sequence of cDNA contained in Clone ID NO:Z.

[0832] The method for diagnosing a pathological condition can comprise a step of detecting nucleic acid molecules comprising a nucleotide sequence in a panel of at least two nucleotide sequences, wherein at least one sequence in said panel is at least 95% identical to a sequence of at least 50 contiguous nucleotides in a sequence selected from said group.

[0833] Also preferred is a composition of matter comprising isolated nucleic acid molecules wherein the nucleotide sequences of said nucleic acid molecules comprise a panel of at least two nucleotide sequences, wherein at least one sequence in said panel is at least 95% identical to a sequence of at least 50 contiguous nucleotides in a sequence selected from the group consisting of: a nucleotide sequence of SEQ ID NO:X or the complementary strand thereto; the nucleotide sequence as defined in column 4 of Table 1A or columns 8 and 9 of Table 2 or the complementary strand thereto; and a nucleotide sequence encoded by cDNA contained in Clone ID NO:Z. The nucleic acid molecules can comprise DNA molecules or RNA molecules.

[0834] Also preferred is a composition of matter comprising isolated nucleic acid molecules wherein the nucleotide sequences of said nucleic acid molecules comprise a DNA microarray or “chip” of at least 1, 2, 3, 4, 5, 6, 7, 8, 9, 10, 15, 20, 25, 30, 40, 50, 100, 150, 200, 250, 300, 500, 1000, 2000, 3000, or 4000 nucleotide sequences, wherein at least one sequence in said DNA microarray or “chip” is at least 95% identical to a sequence of at least 50 contiguous nucleotides in a sequence selected from the group consisting of: a nucleotide sequence of SEQ ID NO:X wherein X is any integer as defined in Table 1A; and a nucleotide sequence encoded by a human cDNA clone identified by a cDNA “Clone ID” in Table 1A.

[0835] Also preferred is an isolated polypeptide comprising an amino acid sequence at least 90% identical to a sequence of at least about 10 contiguous amino acids in the polypeptide sequence of SEQ ID NO:Y; a polypeptide encoded by SEQ ID NO:X or the complementary strand thereto; the polypeptide encoded by the nucleotide sequence as defined in columns 8 and 9 of Table 2; and/or a polypeptide encoded by cDNA contained in Clone ID NO:Z.

[0836] Also preferred is an isolated polypeptide comprising an amino acid sequence at least 95% identical to a sequence of at least about 30 contiguous amino acids in the amino acid sequence of SEQ ID NO:Y; a polypeptide encoded by SEQ ID NO:X or the complementary strand thereto; the polypeptide encoded by the nucleotide sequence as defined in columns 8 and 9 of Table 2; and/or a polypeptide encoded by cDNA contained in Clone ID NO:Z.

[0837] Further preferred is an isolated polypeptide comprising an amino acid sequence at least 95% identical to a sequence of at least about 100 contiguous amino acids in the amino acid sequence of SEQ ID NO:Y; a polypeptide encoded by SEQ ID NO:X or the complementary strand thereto; the polypeptide encoded by the nucleotide sequence as defined in columns 8 and 9 of Table 2; and/or a polypeptide encoded by cDNA contained in Clone ID NO:Z.

[0838] Further preferred is an isolated polypeptide comprising an amino acid sequence at least 95% identical to the complete amino acid sequence of SEQ ID NO:Y; a polypeptide encoded by SEQ ID NO:X or the complementary strand thereto; the polypeptide encoded by the nucleotide sequence as defined in columns 8 and 9 of Table 2; and/or a polypeptide encoded by cDNA contained in Clone ID NO:Z.

[0839] Further preferred is an isolated polypeptide comprising an amino acid sequence at least 90% identical to a sequence of at least about 10 contiguous amino acids in the complete amino acid sequence of a polypeptide encoded by contained in Clone ID NO:Z

[0840] Also preferred is a polypeptide wherein said sequence of contiguous amino acids is included in the amino acid sequence of a portion of said polypeptide encoded by DNA contained in Clone ID NO:Z; a polypeptide encoded by SEQ ID NO:X or the complementary strand thereto; the polypeptide encoded by the nucleotide sequence as defined in columns 8 and 9 of Table 2; and/or the polypeptide sequence of SEQ ID NO:Y.

[0841] Also preferred is an isolated polypeptide comprising an amino acid sequence at least 95% identical to a sequence of at least about 30 contiguous amino acids in the amino acid sequence of a polypeptide encoded by the cDNA contained in Clone ID NO:Z.

[0842] Also preferred is an isolated polypeptide comprising an amino acid sequence at least 95% identical to a sequence of at least about 100 contiguous amino acids in the amino acid sequence of a polypeptide encoded by cDNA contained in Clone ID NO:Z.

[0843] Also preferred is an isolated polypeptide comprising an amino acid sequence at least 95% identical to the amino acid sequence of a polypeptide encoded by the cDNA contained in Clone ID NO:Z.

[0844] Further preferred is an isolated antibody which binds specifically to a polypeptide comprising an amino acid sequence that is at least 90% identical to a sequence of at least 10 contiguous amino acids in a sequence selected from the group consisting of: a polypeptide sequence of SEQ ID NO:Y; a polypeptide encoded by SEQ ID NO:X or the complementary strand thereto; the polypeptide encoded by the nucleotide sequence as defined in columns 8 and 9 of Table 2; and a polypeptide encoded by the cDNA contained in Clone ID NO:Z.

[0845] Further preferred is a method for detecting in a biological sample a polypeptide comprising an amino acid sequence which is at least 90% identical to a sequence of at least 10 contiguous amino acids in a sequence selected from the group consisting of: a polypeptide sequence of SEQ ID NO:Y; a polypeptide encoded by SEQ ID NO:X or the complementary strand thereto; the polypeptide encoded by the nucleotide sequence as defined in columns 8 and 9 of Table 2; and a polypeptide encoded by the cDNA contained in Clone ID NO:Z; which method comprises a step of comparing an amino acid sequence of at least one polypeptide molecule in said sample with a sequence selected from said group and determining whether the sequence of said polypeptide molecule in said sample is at least 90% identical to said sequence of at least 10 contiguous amino acids.

[0846] Also preferred is the above method wherein said step of comparing an amino acid sequence of at least one polypeptide molecule in said sample with a sequence selected from said group comprises determining the extent of specific binding of polypeptides in said sample to an antibody which binds specifically to a polypeptide comprising an amino acid sequence that is at least 90% identical to a sequence of at least 10 contiguous amino acids in a sequence selected from the group consisting of: a polypeptide sequence of SEQ ID NO:Y; a polypeptide encoded by SEQ ID NO:X or the complementary strand thereto; the polypeptide encoded by the nucleotide sequence as defined in columns 8 and 9 of Table 2; and a polypeptide encoded by the cDNA contained in Clone ID NO:Z.

[0847] Also preferred is the above method wherein said step of comparing sequences is performed by comparing the amino acid sequence determined from a polypeptide molecule in said sample with said sequence selected from said group.

[0848] Also preferred is a method for identifying the species, tissue or cell type of a biological sample which method comprises a step of detecting polypeptide molecules in said sample, if any, comprising an amino acid sequence that is at least 90% identical to a sequence of at least 10 contiguous amino acids in a sequence selected from the group consisting of: polypeptide sequence of SEQ ID NO:Y; a polypeptide encoded by SEQ ID NO:X or the complementary strand thereto; the polypeptide encoded by the nucleotide sequence as defined in columns 8 and 9 of Table 2; and a polypeptide encoded by the cDNA contained in Clone ID NO:Z.

[0849] Also preferred is the above method for identifying the species, tissue or cell type of a biological sample, which method comprises a step of detecting polypeptide molecules comprising an amino acid sequence in a panel of at least two amino acid sequences, wherein at least one sequence in said panel is at least 90% identical to a sequence of at least 10 contiguous amino acids in a sequence selected from the above group.

[0850] Also preferred is a method for diagnosing in a subject a pathological condition associated with abnormal structure or expression of a nucleic acid sequence identified in Table 1A or Table 2 encoding a polypeptide, which method comprises a step of detecting in a biological sample obtained from said subject polypeptide molecules comprising an amino acid sequence in a panel of at least two amino acid sequences, wherein at least one sequence in said panel is at least 90% identical to a sequence of at least 10 contiguous amino acids in a sequence selected from the group consisting of: polypeptide sequence of SEQ ID NO:Y; a polypeptide encoded by SEQ ID NO:X or the complementary strand thereto; the polypeptide encoded by the nucleotide sequence as defined in columns 8 and 9 of Table 2; and a polypeptide encoded by the cDNA contained in Clone ID NO:Z.

[0851] In any of these methods, the step of detecting said polypeptide molecules includes using an antibody.

[0852] Also preferred is an isolated nucleic acid molecule comprising a nucleotide sequence which is at least 95% identical to a nucleotide sequence encoding a ploypeptide wherein said polypeptide comprises an amino acid sequence that is at least 90% identical to a sequence of at least 10 contiguous amino acids in a sequence selected from the group consisting of: polypeptide sequence of SEQ ID NO:Y; a polypeptide encoded by SEQ ID NO:X or the complementary strand thereto; the polypeptide encoded by the nucleotide sequence as defined in columns 8 and 9 of Table 2; and a polypeptide encoded by the cDNA contained in Clone ID NO:Z.

[0853] Also preferred is an isolated nucleic acid molecule, wherein said nucleotide sequence encoding a polypeptide has been optimized for expression of said polypeptide in a prokaryotic host.

[0854] Also preferred is a polypeptide molecule, wherein said polypeptide comprises an amino acid sequence selected from the group consisting of: polypeptide sequence of SEQ ID NO:Y; a polypeptide encoded by SEQ ID NO:X or the complementary strand thereto; the polypeptide encoded by the nucleotide sequence as defined in columns 8 and 9 of Table 2; and a polypeptide encoded by the cDNA contained in Clone ID NO:Z.

[0855] Further preferred is a method of making a recombinant vector comprising inserting any of the above isolated nucleic acid molecule into a vector. Also preferred is the recombinant vector produced by this method. Also preferred is a method of making a recombinant host cell comprising introducing the vector into a host cell, as well as the recombinant host cell produced by this method.

[0856] Also preferred is a method of making an isolated polypeptide comprising culturing this recombinant host cell under conditions such that said polypeptide is expressed and recovering said polypeptide. Also preferred is this method of making an isolated polypeptide, wherein said recombinant host cell is a eukaryotic cell and said polypeptide is a human protein comprising an amino acid sequence selected from the group consisting of: polypeptide sequence of SEQ ID NO:Y; a polypeptide encoded by SEQ ID NO:X or the complementary strand thereto; the polypeptide encoded by the nucleotide sequence as defined in columns 8 and 9 of Table 2; and a polypeptide encoded by the cDNA contained in Clone ID NO:Z. The isolated polypeptide produced by this method is also preferred.

[0857] Also preferred is a method of treatment of an individual in need of an increased level of a protein activity, which method comprises administering to such an individual a Therapeutic comprising an amount of an isolated polypeptide, polynucleotide, immunogenic fragment or analogue thereof, binding agent, antibody, or antigen binding fragment of the claimed invention effective to increase the level of said protein activity in said individual.

[0858] Also preferred is a method of treatment of an individual in need of a decreased level of a protein activity, which method comprised administering to such an individual a Therapeutic comprising an amount of an isolated polypeptide, polynucleotide, immunogenic fragment or analogue thereof, binding agent, antibody, or antigen binding fragment of the claimed invention effective to decrease the level of said protein activity in said individual.

[0859] Also preferred is a method of treatment of an individual in need of a specific delivery of toxic compositions to diseased cells (e.g., tumors, leukemias or lymphomas), which method comprises administering to such an individual a Therapeutic comprising an amount of an isolated polypeptide of the invention, including, but not limited to a binding agent, or antibody of the claimed invention that are associated with toxin or cytotoxic prodrugs.

[0860] Having generally described the invention, the same will be more readily understood by reference to the following examples, which are provided by way of illustration and are not intended as limiting.

TABLE 6

| ATCC Deposits | Deposit Date | ATCC Designation Number |
|---|---|---|
| LP01, LP02, LP03, | May-20-97 | 209059, 209060, 209061, 209062, |
| LP04, LP05, LP06, | | 209063, 209064, 209065, 209066, |
| LP07, LP08, LP09, | | 209067, 209068, 209069 |
| LP10, LP11, | | |
| LP12 | Jan-12-98 | 209579 |
| LP13 | Jan-12-98 | 209578 |
| LP14 | Jul-16-98 | 203067 |
| LP15 | Jut-16-98 | 203068 |
| LP16 | Feb-1-99 | 203609 |
| LP17 | Feb-1-99 | 203610 |
| LP20 | Nov-17-98 | 203485 |
| LP21 | Jun-18-99 | PTA-252 |
| LP22 | Jun-18-99 | PTA-253 |
| LP23 | Dec-22-99 | PTA-1081 |

### EXAMPLES

### Example 1

### Isolation of a Selected cDNA Clone From the Deposited Sample

[0861] Each Clone ID NO:Z is contained in a plasmid. Table 7 identifies the vectors used to construct the cDNA library from which each clone was isolated. In many cases, the vector used to construct the library is a phage vector from which a plasmid has been excised. The following correlates the related plasmid for each phage vector used in constructing the cDNA library. For example, where a particular clone is identified in Table 7 as being isolated in the vector “Lambda Zap,” the corresponding deposited clone is in “pBluescript.”

| Vector Used to Construct Library | Corresponding Deposited Plasmid |
|---|---|
| Lambda Zap | pBlue script (pBS) |
| Uni-Zap XR | pBluescript (pBS) |
| Zap Express | pBK |
| lafmidBA | plafmid BA |
| pSport1 | pSport1 |
| pCMVSport 2.0 | pCMVSport 2.0 |
| pCMVSport 3.0 | pCMVSport 3.0 |
| pCR ®2.1 | pCR ®2.1 |

[0862] Vectors Lambda Zap (U.S. Pat. Nos. 5,128,256 and 5,286,636), Uni-Zap XR (U.S. Pat. Nos. 5,128, 256 and 5,286,636), Zap Express (U.S. Pat. Nos. 5,128,256 and 5,286,636), pBluescript (pBS) (Short, J. M. et al., Nucleic Acids Res. 16:7583-7600 (1988); Alting-Mees, M. A. and Short, J. M., Nucleic Acids Res. 17:9494 (1989)) and pBK (Alting-Mees, M. A. et al., Strategies 5:58-61 (1992)) are commercially available from Stratagene Cloning Systems, Inc., 11011 N. Torrey Pines Road, La Jolla, Calif., 92037. pBS contains an ampicillin resistance gene and pBK contains a neomycin resistance gene. Both can be transformed into E. coli strain XL-1 Blue, also available from Stratagene. pBS comes in 4 forms SK+, SK−, KS+ and KS. The S and K refers to the orientation of the polylinker to the T7 and T3 primer sequences which flank the polylinker region (“S” is for SacI and “K” is for KpnI which are the first sites on each respective end of the linker). “+” or “−” refer to the orientation of the fl origin of replication (“ori”), such that in one orientation, single stranded rescue initiated from the f1 ori generates sense strand DNA and in the other, antisense.

[0863] Vectors pSportl, pCMVSport 2.0 and pCMVSport 3.0, were obtained from Life Technologies, Inc., P. O. Box 6009, Gaithersburg, Md. 20897. All Sport vectors contain an ampicillin resistance gene and may be transformed into E. coli strain DH10B, also available from Life Technologies. (See, for instance, Gruber, C. E., et al., Focus 15:59 (1993).) Vector lafmid BA (Bento Soares, Columbia University, N.Y.) contains an ampicillin resistance gene and can be transformed into E. coli strain XL-1 Blue. Vector pCR® 2.1, which is available from Invitrogen, 1600 Faraday Avenue, Carlsbad, Calif. 92008, contains an ampicillin resistance gene and may be transformed into E. coli strain DH10B, available from Life Technologies. (See, for instance, Clark, J. M., Nuc. Acids Res. 16:9677-9686 (1988) and Mead, D. et al., BiolTechnology 9: (1991).) Preferably, a polynucleotide of the present invention does not comprise the vector sequences identified for the particular clone in Table 7, as well as the corresponding plasmid vector sequences designated above.

[0864] The deposited material in the sample assigned the ATCC Deposit Number cited by reference to Tables 1A, 2, 6 and 7 for any given cDNA clone also may contain one or more additional plasmids, each comprising a cDNA clone different from that given clone. Thus, deposits sharing the same ATCC Deposit Number contain at least a plasmid for each Clone ID NO:Z.

TABLE 7

| Libraries | | | |
|---|---|---|---|
| owned by | | | ATCC |
| Catalog | Catalog Description | Vector | Deposit |
| HUKA HUKB | Human Utenne Cancer | Lambda | LP01 |
| HUKC HUKD | | ZAP II | |
| HUKE HUKF | | | |
| HUKG | | | |
| HCNA HCNB | Human Colon | Lambda | LP01 |
| | | Zap II | |
| HFFA | Human Fetal Brain, random | Lambda | LP01 |
| | primed | ZAP II | |
| HTWA | Resting T-Cell | Lambda | LP01 |
| | | Zap II | |
| HBQA | Early Stage Human Brain, | Lambda | LP01 |
| | ramdom primed | Zap II | |
| HLMB HLMF | breast lymph node CDNA | Lambda | LP01 |
| HLMG HLMH | library | ZAP II | |
| HLMI HLMJ | | | |
| HLMM HLMN | | | |
| HCQA HCQB | human colon cancer | Lamda | LP01 |
| | | ZAP II | |
| HMEA HMEC | Human Microvascular | Lambda | LP01 |
| HMED HMEE | Endothelial Cells, fract. A | ZAP II | |
| HMEF HMEG | | | |
| HMEI HMEJ | | | |
| HMEK HMEL | | | |
| HUSA HUSC | Human Umbilical Vein | Lambda | LP01 |
| | Endothelial Cells, fract. A | ZAP II | |
| HLQA HLQB | Hepatocellular Tumor | Lambda | LP01 |
| | | ZAP II | |
| HHGA HHGB | Hemangiopericytoma | Lambda | LP01 |
| HHGC HHGD | ZAP II | | |
| HSDM | Human Striatum Depression, re- | Lambda | LP01 |
| | rescue | ZAP II | |
| HUSH | H Umbilical Vein Endothelial | Lambda | LP01 |
| | cells, frac A, re-excision | ZAP II | |
| HSGS | Salivary gland, subtracted | Lambda | LP01 |
| | | ZAP II | |
| HFXA HFXB | Brain frontal cortex | Lambda | LP01 |
| HFXC HFXD | | ZAP II | |
| HFXE HFXF | | | |
| HFXG HFXH | | | |
| HPQA HPQB | PERM TF274 | Lambda | LP01 |
| HPQC | | ZAP II | |
| HFXJ HFXK | Brain Frontal Cortex, re- | Lambda | LP0 1 |
| | excision | ZAP II | |
| HCWA HCWB | CD34 positive cells (Cord | ZAP Express | LP02 |
| HCWC HCWD | Blood) | | |
| HCWE HCWF | | | |
| HCWG HCWH | | | |
| HCWI HCWJ | | | |
| HCWK | | | |
| HCUA HCUB | CD34 depleted Buffy Coat | ZAP Express | LP02 |
| HCUC | (Cord Blood) | | |
| HRSM | A-14 cell line | ZAP Express | LP02 |
| HRSA | A1-CELL LINE | ZAP Express | LP02 |
| HCUD HCUE | CD34 depleted Buffy Coat | ZAP Express | LP02 |
| HCUF HCUG | (Cord Blood), re-excision | | |
| HCUH HCUI | | | |
| HBXE HBXF | H. Whole Brain #2, re-excision | ZAP Express | LP02 |
| HBXG | | | |
| HRLM | LS cell line | ZAP Express | LP02 |
| HBXA HBXB | Human Whole Brain #2 - | ZAP Express | LP02 |
| HBXC HBXD | Oligo dT > 1.5 Kb | | |
| HUDA HUDB | Testes | ZAP Express | LP02 |
| HUDC | | | |
| HHTM HHTN | H. hypothalamus, frac A; | ZAP Express | LP02 |
| HHTO | re-excision | | |
| HHTL | H. hypothalamus, frac A | ZAP Express | LP02 |
| HASA HASD | Human Adult Spleen | Uni-ZAP XR | LP03 |
| HFKC HFKD | Human Fetal Kidney | Uni-ZAP XR | LP03 |
| HFKE HFKF | | | |
| HFKG | | | |
| HE8A HE8B | Human 8 Week Whole Embryo | Uni-ZAP XR | LP03 |
| HE8C HE8D | | | |
| HE8E HE8F | | | |
| HE8M HE8N | | | |
| HGBA HGBD | Human Gall Bladder | Uni-ZAP XR | LP03 |
| HGBE HGBF | | | |
| HGBG HGBH | | | |
| HGBI | | | |
| HLHA HLHB | Human Fetal Lung III | Uni-ZAP XR | LP03 |
| HLHC HLHD | | | |
| HLHE HLHF | | | |
| HLHG HLHH | | | |
| HLHQ | | | |
| HPMA HPMB | Human Placenta | Uni-ZAP XR | LP03 |
| HPMC HPMD | | | |
| HPME HPMF | | | |
| HPMG HPMH | | | |
| HPRA HPRB | Human Prostate | Uni-ZAP XR | LP03 |
| HPRC HPRD | | | |
| HSIA HSIC | Human Adult Small Intestine | Uni-ZAP XR | LP03 |
| HSID HSIE | | | |
| HTEA HTEB | Human Testes | Uni-ZAP XR | LP03 |
| HTEC HTED | | | |
| HTEE HTEF | | | |
| HTEG HTEH | | | |
| HTEI HTEJ | | | |
| HTEK | | | |
| HTPA HTPB | Human Pancreas Tumor | Uni-ZAP XR | LP03 |
| HTPC HTPD | | | |
| HTPE | | | |
| HTTA HTTB | Human Testes Tumor | Uni-ZAP XR | LP03 |
| HTTC HTTD | | | |
| HTTE | HTTF | | |
| HAPA HAPB | Human Adult Pulmonary | Uni-ZAP XR | LP03 |
| HAPC HAPM | | | |
| HETA HETB | Human Endometrial Tumor | Uni-ZAP XR | LP03 |
| HETC HETD | | | |
| HETE HETF | | | |
| HETG HETH | | | |
| HETI | | | |
| HHFB HHFC | Human Fetal Heart | Uni-ZAP XR | LP03 |
| HHFD HHFE | | | |
| HHFF HHFG | | | |
| HHFH HHFI | | | |
| HHPB HHPC | Human Hippocampus | Uni-ZAP XR | LP03 |
| HHPD HHPE | | | |
| HHPF HHPG | | | |
| HHPH | | | |
| HCE1 HCE2 | Human Cerebellum | Uni-ZAP XR | LP03 |
| HCE3 HCE4 | | | |
| HCE5 HCEB | | | |
| HCEC HCED | | | |
| HCEE HCEF | | | |
| HCEG | | | |
| HUVB HUVC | Human Umbilical Vein, Endo. | Uni-ZAP XR | LP03 |
| HUVD HUVE | remake | | |
| HSTA HSTB | Human Skin Tumor | Uni-ZAP XR | LP03 |
| HSTC HSTD | | | |
| HTAA HTAB | Human Activated T-Cells | Uni-ZAP XR | LP03 |
| HTAC HTAD | | | |
| HTAE | | | |
| HFEA HFEB | Human Fetal Epithelium (Skin) | Uni-ZAP XR | LP03 |
| HFEC | | | |
| HJPA HJPB | HUMAN JURKAT | Uni-ZAP XR | LP03 |
| HJPC HJPD | MEMBRANE BOUND | | |
| | POLYSOMES | | |
| HESA | Human epithelioid sarcoma | Uni-Zap XR | LP03 |
| HLTA HLTB | Human T-Cell Lymphoma | Uni-ZAP XR | LP03 |
| HLTC HLTD | | | |
| HLTE HLTF | | | |
| HFTA HFTB | Human Fetal Dura Mater | Uni-ZAP XR | LP03 |
| HFTC HFTD | | | |
| HRDA HRDB | Human Rhabdomyosarcoma | Uni-ZAP XR | LP03 |
| HRDC HRDD | | | |
| HRDE HRDF | | | |
| HCAA HCAB | Cern cells cyclohexamide treated | Uni-ZAP XR | LP03 |
| HCAC | | | |
| HRGA HRGB | Raji Cells, cyclohexamide | Uni-ZAP XR | LP03 |
| HRGC HRGD | treated | | |
| HSUA HSUB | Supt Cells, cyclohexamide | Uni-ZAP XR | LP03 |
| HSUC HSUM | treated | | |
| HT4A HT4C | Activated T-Cells, 12 hrs | Uni-ZAP XR | LP03 |
| HT4D | | | |
| HE9A HE9B | Nine Week Old Early Stage | Uni-ZAP XR | LP03 |
| HE9C HE9D | Human | | |
| HE9E HE9F | | | |
| HE9G HE9H | | | |
| HE9M HE9N | | | |
| HATA HATB | Human Adrenal Gland Tumor | Uni-ZAP XR | LP03 |
| HATC HATD | | | |
| HATE | | | |
| HT5A | Activated T-Cells, 24 hrs. | Uni-ZAP XR | LP03 |
| HFGA HFGM | Human Fetal Brain | Uni-ZAP XR | LP03 |
| HNEA HNEB | Human Neutrophil | Uni-ZAP XR | LP03 |
| HNEC HNED | | | |
| HNEE | | | |
| HBGB HBGD | Human Primary Breast Cancer | Uni-ZAP XR | LP03 |
| HBNA HBNB | Human Normal Breast | Uni-ZAP XR | LP03 |
| HCAS | Cern Cells, cyclohexamide | Uni-ZAP XR | LP03 |
| | treated, subtra | | |
| HHPS | Human Hippocampus, | pBS | LP03 |
| | subtracted | | |
| HKCS HKCU | Human Colon Cancer, | pBS | LP03 |
| | subtracted | | |
| HRGS | Raji cells, cyclohexamide | pBS | LP03 |
| | treated, subtracted | | |
| HSUT | Supt cells, cyclohexamide | pBS | LP03 |
| | treated, differentially | | |
| | expressed | | |
| HT4S | Activated T-Cells, 12 hrs, | Uni-ZAP XR | LP03 |
| | subtracted | | |
| HCDA HCDB | Human Chondrosarcoma | Uni-ZAP XR | LP03 |
| HCDC HCDD | | | |
| HCDE | | | |
| HOAA HOAB | Human Osteosarcorna | Uni-ZAP XR | LP03 |
| HOAC | | | |
| HTLA HTLB | Human adult testis, large inserts | Uni-ZAP XR | LP03 |
| HTLC HTLD | | | |
| HTLE HTLF | | | |
| HLMA HLMC | Breast Lymph node cDNA | Uni-ZAP XR | LP03 |
| HLMD | library | | |
| H6EA H6EB | HL-60, PMA 4H | Uni-ZAP XR | LP03 |
| H6EC | | | |
| HTXA HTXB | Activated T-Cell (12hs)/ | Uni-ZAP XR | LP03 |
| HTXC HTXD | Thiouridine | | |
| HTXE HTXF | labelledEco | | |
| HTXG HTXH | | | |
| HNFA HNFB | Human Neutrophil, Activated | Uni-ZAP XR | LP03 |
| HNFC HNFD | | | |
| HNFE HNFF | | | |
| HNFG HNFH | | | |
| HNFJ | | | |
| HTOB HTOC | HUMAN TONSILS, | Uni-ZAP XR | LP03 |
| | FRACTION 2 | | |
| HMGB | Human OB MG63 control | Uni-ZAP XR | LP03 |
| | fraction I | | |
| HOPB | Human OB HOS control | Uni-ZAP XR | LP03 |
| | fraction I | | |
| HORB | Human GB HOS treated | Uni-ZAP XR | LP03 |
| | (10 nM E2) fraction I | | |
| HSVA HSVB | Human Chronic Synovitis | Uni-ZAP XR | LP03 |
| HSVC | | | |
| HROA | HUMAN STOMACH | Uni-ZAP XR | LP03 |
| HBJA HBJB | HUMAN B CELL | Uni-ZAP XR | LP03 |
| HBJC HBJD | LYMPHOMA | | |
| HBJE HBJF | | | |
| HBJG HBJH | | | |
| HBJI HBJJ | | | |
| HBJK | | | |
| HCRA HCRB | human corpus colosum | Uni-ZAP XR | LP03 |
| HCRC | | | |
| HODA HODB | human ovarian cancer | Uni-ZAP XR | LP03 |
| HODC HODD | | | |
| HDSA | Dermatofibrosarcoma | Uni-ZAP XR | LP03 |
| | Protuberance | | |
| HMWA | Bone Marrow Cell Line | Uni-ZAP XR | LP03 |
| HMWB | (RS4;11) | | |
| HMWC | | | |
| HMWD | | | |
| HMWE | | | |
| HMWF | | | |
| HMWG | | | |
| HMWH | | | |
| HMWI | | | |
| HMWJ | | | |
| HSOA | stomach cancer (human) | Uni-ZAP XR | LP03 |
| HERA | SKIN | Uni-ZAP XR | LP03 |
| HMDA | Brain-medulloblastoma | Uni-ZAP XR | LP03 |
| HGLA HGLB | Glioblastoma | Uni-ZAP XR | LP03 |
| HGLD | | | |
| HEAA | H. Atrophic Endometrium | Uni-ZAP XR | LP03 |
| HBCA HBCB | H. Lymph node breast Cancer | Uni-ZAP XR | LP03 |
| HPWT | Human Prostate BPH, re- | Uni-ZAP XR | LP03 |
| | excision | | |
| HFVG HFVH | Fetal Liver, subtraction IL | pBS | LP03 |
| HFVI | | | |
| HNFI | Human Neutrophils, Activated, | pBS | LP03 |
| | re-excision | | |
| HBMB HBMC | Human Bone Marrow, re- | pBS | LP03 |
| HBMD | excision | | |
| HKML | H. Kidney Medulla, re-excision | pBS | LP03 |
| HKMM | | | |
| HKMN | | | |
| HKIX HKIY | H. Kidney Cortex, subtracted | pBS | LP03 |
| HADT | H. Amygdala Depression, | pBS | LP03 |
| | subtracted | | |
| H6AS | HI-60, untreated, subtracted | Uni-ZAP XR | LP03 |
| H6ES | HL-60, PMA 4H, subtracted | Uni-ZAP XR | LP03 |
| H6BS | HL-60, PA 4h, Subtracted | Uni-ZAP XR | LP03 |
| H6CS | HL-60, PMA 1d, subtracted | Uni-ZAP XR | LP03 |
| HTXJ HTXK | Activated T-cell(12h)/ | Uni-ZAP XR | LP03 |
| | Thiouridine-re-excision | | |
| HMSA HMSB | Monocyte activated | Uni-ZAP XR | LP03 |
| HMSC HMSD | | | |
| HMSE HMSF | | | |
| HMSG HMSH | | | |
| HMSI HMSJ | | | |
| HMSK | | | |
| HAGA HAGB | Human Amygdaia | Uni-ZAP XR | LP03 |
| HAGC HAGD | | | |
| HAGE HAGF | | | |
| HSRA HSRB | STROMAL- | Uni-ZAP XR | LP03 |
| HSRE | OSTEOCLASTOMA | | |
| HSRD HSRF | Human Osteoclastoma Stromal | Uni-ZAP XR | LP03 |
| HSRG HSRH | Cells - unamplified | | |
| HSQA HSQB | Stromal cell TF274 | Uni-ZAP XR | LP03 |
| HSQC HSQD | | | |
| HSQE HSQF | | | |
| HSQG | | | |
| HSKA HSKB | Smooth muscle, serum treated | Uni-ZAP XR | LP03 |
| HSKC HSKD | | | |
| HSKE HSKF | | | |
| HSKZ | | | |
| HSLA HSLB | Smooth muscle,control | Uni-ZAP XR | LP03 |
| HSLC HSLD | | | |
| HSLE HSLF | | | |
| HSLG | | | |
| HSDA HSDD | Spinal cord | Uni-ZAP XR | LP03 |
| HSDE HSDF | | | |
| HSDG HSDH | | | |
| HPWS | Prostate-BPH subtracted II | pBS | LP03 |
| HSKW HSKX | Smooth Muscle- | pBS | LP03 |
| HSKY | HASTE normalized | | |
| HFPB HFPC | H. Frontal cortex, epileptic; | Uni-ZAP XR | LP03 |
| HFPD | re-excision | | |
| HSDI HSDJ | Spinal Cord, re-excision | Uni-ZAP XR | LP03 |
| HSDK | | | |
| HSKN HSKO | Smooth Muscle Serum Treated, | pBS | LP03 |
| | Norm | | |
| HSKG HSKH | Smooth muscle, serum induced, | pBS | LP03 |
| HSKI | re-exc | | |
| HFCA HFCB | Human Fetal Brain | Uni-ZAP XR | LP04 |
| HFCC HFCD | | | |
| HFCE HFCF | | | |
| HPTA HPTB | Human Pituitaxy | Uni-ZAP XR | LP04 |
| HPTD | | | |
| HTHB HTHC | Human Thymus | Uni-ZAP XR | LP04 |
| HTHD | | | |
| HE6B HE6C | Human Whole Six Week Old | Uni-ZAP XR | LP04 |
| HE6D HE6E | Embryo | | |
| HE6F HE6G | | | |
| HE6S | | | |
| HSSA HSSB | Human Synovial Sarcoma | Uni-ZAP XR | LP04 |
| HSSC HSSD | | | |
| HSSE HSSF | | | |
| HSSG HSSH | | | |
| HSSL HSSJ | | | |
| HSSK | | | |
| HE7T | 7 Week Old Early Stage Human, | Uni-ZAP XR | LP04 |
| | subtracted | | |
| HEPA HEPB | Human Epididymus | Uni-ZAP XR | LP04 |
| HEPC | | | |
| HSNA HSNB | Human Synovium | Uni-ZAP XR | LP04 |
| HSNC HSNM | | | |
| HSNN | | | |
| HPFB HPFC | Human Prostate Cancer, Stage | Uni-ZAP XR | LP04 |
| HPFD HPFE | C fraction | | |
| HE2A HE2D | 12 Week Old Early Stage | Uni-ZAP XR | LP04 |
| | Human | | |
| HE2E HE2H | | | |
| HE2I HE2M | | | |
| HE2N HE2O | | | |
| HE2B HE2C | 12 Week Old Early Stage | Uni-ZAP XR | LP04 |
| HE2F HE2G | Human, II | | |
| HE2P HE2Q | | | |
| HPTS HPTT | Human Pituitary, subtracted | Uni-ZAP XR | LP04 |
| HPTU | | | |
| HAUA HAUB | Amniotic Cells - TNP induced | Uni-ZAP XR | LP04 |
| HAUC | | | |
| HAQA HAQB | Amniotic Cells - Primary | Uni-ZAP XR | LP04 |
| HAQC HAQD | Culture | | |
| HWTA HWTB | wilm's tumor | Uni-ZAP XR | LP04 |
| HWTC | | | |
| HBSD | Bone Cancer, re-excision | Uni-ZAP XR | LP04 |
| HSGB | Salivary gland, re-excision | Uni-ZAP XR | LP04 |
| HSJA HSJB | Smooth muscle-ILb induced | Uni-ZAP XR | LP04 |
| HSJC | | | |
| HSXA HSXB | Human Substantia Nigra | Uni-ZAP XR | LP04 |
| HSCC HSXD | | | |
| HSHA HSHB | Smooth muscle, ILlb induced | Uni-ZAP XR | LP04 |
| HSHC | | | |
| HOUA HOUB | Adipocytes | Uni-ZAP XR | LP04 |
| HOUC HOUD | | | |
| HOUE | | | |
| HPWA HPWB | Prostate BPH | Uni-ZAP XR | LP04 |
| HPWC HPWD | | | |
| HPWE | | | |
| HELA HELB | Endothelial cells-control | Uni-ZAP XR | LP04 |
| HELC HELD | | | |
| HELE HELF | | | |
| HELG HELH | | | |
| HEMA HEMB | Endothelial-induced | Uni-ZAP XR | LP04 |
| HEMC HEMD | | | |
| HEME HEMF | | | |
| HEMG HEMH | | | |
| HBIA HBIB | Human Brain, Striatum | Uni-ZAP XR | LP04 |
| HBIC | | | |
| HHSA HHSB | Human Hypothalmus, | Uni-ZAP XR | LP04 |
| HHSC HHSD | Schizophrenia | | |
| HHSE | | | |
| HNGA HNGB | neutrophils control | Uni-ZAP XR | LP04 |
| HNGC HNGD | | | |
| HNGE HNGF | | | |
| HNGG HNGH | | | |
| HNGI HNGJ | | | |
| HNHA HNHB | Neutrophils IL-l and LPS | Uni-ZAP XR | LP04 |
| HNHC HNHD | induced | | |
| HNHE HNHF | | | |
| HNHG HNHH | | | |
| HNHI HNHJ | | | |
| HSDB HSDC | STRIATUM DEPRESSION | Uni-ZAP XR | LP04 |
| HHPT | Hypothalamus | Uni-ZAP XR | LP04 |
| HSAT HSAU | Anergic T-cell | Uni-ZAP XR | LP04 |
| HSAV HSAW | | | |
| HSAX HSAY | | | |
| HSAZ | | | |
| HBMS HBMT | Bone marrow | Uni-ZAP XR | LP04 |
| HBMU HBMV | | | |
| HBMW | | | |
| HBMX | | | |
| HOBA HOEB | Osteoblasts | Uni-ZAP XR | LP04 |
| HOEC HOED | | | |
| HOEE HOEF | | | |
| HOEJ | | | |
| HAIA HAIB | Epithelial-TNFa and INF | Uni-ZAP XR | LP04 |
| HAIC HAID | induced | | |
| HAIE HAIF | | | |
| HTGA HTGB | Apoptotic T-cell | Uni-ZAP XR | LP04 |
| HTGC HTGD | | | |
| HMCA HMCB | Macrophage-oxLDL | Uni-ZAP XR | LP04 |
| HMCC HMCD | | | |
| HMCE | | | |
| HMAA HMAB | Macrophage (GM-CSF treated) | Uni-ZAP XR | LP04 |
| HMAC HMAD | | | |
| HMAE HMAF | | | |
| HMAG | | | |
| HPHA | Normal Prostate | Uni-ZAP XR | LP04 |
| HPIA HPIB | LNCAP prostate cell line | Uni-ZAP XR | LP04 |
| HPIC | | | |
| HPJA HPJB | PC3 Prostate cell line | Uni-ZAP XR | LP04 |
| HPJC | | | |
| HOSE HOSF | Human Osteoclastoma, re- | Uni-ZAP XR | LP04 |
| HOSG | excision | | |
| HTGE HTGF | Apoptotic T-cell, re- | Uni-ZAP XR | LP04 |
| | excision | | |
| HMAJ HMAK | H Macrophage (GM-CSF | Uni-ZAP XR | LP04 |
| | treated), re-excision | | |
| HACB HACC | Human Adipose Tissue, re- | Uni-ZAP XR | LP04 |
| HACD | excision | | |
| HFPA | H. Frontal Cortex, Epileptic | Uni-ZAP XR | LP04 |
| HFAA HFAB | Alzheimers, spongy change | Uni-ZAP XR | LP04 |
| HFAC HFAD | | | |
| HFAE | | | |
| HFAM | Frontal Lobe, Dementia | Uni-ZAP XR | LP04 |
| HMIA HMIB | Human Manic Depression | Uni-ZAP XR | LP04 |
| HMIC | Tissue | | |
| HTSA HTSE | Human Thymus | pBS | LP05 |
| HTSF HTSG | | | |
| HTSH | | | |
| HPBA HPBB | Human Pineal Gland | pBS | LP05 |
| HPBC HPBD | | | |
| HPBE | | | |
| HSAA HSAB | HSA 172 Cells | pBS | LP05 |
| HSAC | | | |
| HSBA HSBB | HSC172 cells | pBS | LP05 |
| HSBC HSBM | | | |
| HJAA HJAB | Jurkat T-cell 61 phase | pBS | LP05 |
| HJAC HJAD | | | |
| HJBA HJBB | Jurkat T-Cell, S phase | pBS | LP05 |
| HJBC HJBD | | | |
| HAFA HAFB | Aorta endothelial cells + | pBS | LP05 |
| | TNF-a | | |
| HAWA | Human White Adipose | pBS | LP05 |
| HAWB | | | |
| HAWC | | | |
| HTNA HTNB | Human Thyroid | pBS | LP05 |
| HONA | Normal Ovary, | pBS | LP05 |
| | Premenopausal | | |
| HARA HARB | Human Adult Retina | pBS | LP05 |
| HLJA HLJB | Human Lung | pCMVSport | LP06 |
| | | 1 | |
| HOEM HOFN | H. Ovarian Tumor, 11, | pCMVSport | LP07 |
| HOFO | OV5232 | 2.0 | |
| HOGA HOGB | OV 10-3-95 | pCMVSport | LP07 |
| HOGC | | 2.0 | |
| HCGL | CD34 + cells, II | pCMVSport | LP07 |
| | | 2.0 | |
| HDLA | Hodgkin's Lymphoma I | pCMVSport | LP07 |
| | | 2.0 | |
| HDTA HDTB | Hodgkin's Lymphoma II | pCMVSport | LP07 |
| HDTC HDTD | | 2.0 | |
| HDTE | | | |
| HKAA HKAB | Keratinocyte | pCMVSport | LP07 |
| HKAC HKAD | | 2.0 | |
| HKAE HKAF | | | |
| HKAG HKAH | | | |
| HCIM | CAPFINDER, Crohn's | pCMVSport | LP07 |
| | Disease, lib 2 | 2.0 | |
| HKAL | Keratinocyte, lib 2 | pCMVSport | LP07 |
| | | 2.0 | |
| HKAT | Keratinocyte, hb 3 pCMVSport | LP07 | |
| | | 2.0 | |
| HNDA | Nasal polyps | pCMVSport | LP07 |
| | | 2.0 | |
| HDRA | H. Primary Dendritic | pCMVSport | LP07 |
| | | Cells, lib 3 | 2.0 |
| HOHA HOHB | Human Osteoblasts II | pCMVSport | LP07 |
| HOHC | | 2.0 | |
| HLDA HLDB | Liver, Hepatoma | pCMVSport | LP08 |
| HLDC | | 3.0 | |
| HLDN HUDO | Human Liver, normal | pCMVSport | LP0S |
| HLDP | | 3.0 | |
| HMTA | pBMC stimulated w/ | pCMVSport | LP08 |
| | poly I/C | 3.0 | |
| HNTA | NTERA2, control | pCMVSport | LP08 |
| | | 3.0 | |
| HDPA HDPB | Primary Dendritic Cells, | pCMVSport | LP08 |
| HDPC HDPD | lib 1 | 3.0 | |
| HDPF HDPG | | | |
| HDPH HDPI | | | |
| HDPJ HDPK | | | |
| HDPM HDPN | Primary Dendritic cells, | pCMVSport | LP08 |
| HDPO HDPP | frac 2 | 3.0 | |
| HMUA HMUB | Myoloid Progenitor Cell | pCMVSport | LP0S |
| HMUC | Line | 3.0 | |
| HHEA HHEB | Cell helper I | pCMVSport | LP08 |
| HHEC HHED | | 3.0 | |
| HHEM HHEN | T cell helper II | pCMVSport | LP08 |
| HHEO HHEP | | 3.0 | |
| HEQA HEQB | Human endometrial stromal | pCMVSport | LP08 |
| HEQC | cells | 3.0 | |
| HJMA HJMB | Human endometrial stromal | pCMVSport | LP0S |
| | cells-treated with | 3.0 | |
| | progesterone | | |
| HSWA HSWB | Human endometrial stromal | pCMVSport | LP08 |
| HSWC | cells-treated with | 3.0 | |
| | estradiol | | |
| HSYA HSYB | Human Thymus Stromal Cells | pCMVSport | LP08 |
| HSYC | | 3.0 | |
| HLWA HLWB | Human Placenta | pCMVSport | LP08 |
| HLWC | | 3.0 | |
| HRAA HRAB | Rejected Kidney, lib 4 | pCMVSport | LP08 |
| HRAC | | 3.0 | |
| HMTM | PCR, pBMC IIC treated | PCRII | LP09 |
| HMJA | H. Meniingima, M6 | pSport 1 | LP10 |
| HMKA HMKB | H. Meningima, M1 | pSport I | LP10 |
| HMKC HMKD | | | |
| HMKE | | | |
| HUSG HUSI | Human umbilical vein | pSport 1 | LP10 |
| | endothelial cells, IL-4 | | |
| | induced | | |
| HUSX HUSY | Human Umbilical Vein | pSport 1 | LP10 |
| | Endothelial Cells, | | |
| | uninduced | | |
| HOFA | Ovarian Tumor I, OV5232 | pSport 1 | LP10 |
| HCFA HCFB | T-Cell PHA 16 hrs | pSport 1 | LPIO |
| HCFC HCFD | | | |
| HCFL HCFM | T-Cell PHA 24 hrs | pSport 1 | LP10 |
| HCFN HCFO | | | |
| HADA HADC | Human Adipose | pSport 1 | LP10 |
| HADD HADE | | | |
| HADF HADG | | | |
| HOVA HOVB | Human Ovary | pSport 1 | LP10 |
| HOVC | | | |
| HTWB | Resting T-Cell Library, II | p Sport 1 | LP10 |
| HTWC | | | |
| HTWD | | | |
| HTWE | | | |
| HTWF | | | |
| HMMA | Spleen metastic melanoma | pSport 1 | LP10 |
| HLYA HLYB | Spleen, Chronic lymphocytic | pSport 1 | LP10 |
| HLYC HLYD | leukemia | | |
| HLYE | | | |
| HCGA | CD34 + cell, I | pSport 1 | LP10 |
| HEOM HEON | Human Eosinophils | pSport 1 | LP10 |
| HTDA | Human Tonsil, Lib 3 | pSport 1 | LP10 |
| HSPA | Salivary Gland, Lib 2 | pSport 1 | LP10 |
| HCHA HCHB | Breast Cancer cell line, | pSport 1 | LPI0 |
| HCHC | MDA 36 | | |
| HCHM HCHN | Breast Cancer Cell line, | pSport 1 | LP10 |
| | angiogenic | | |
| HCIA | Crohns Disease | pSport 1 | LP10 |
| HDAA HDAB | HEL cell line | pSport 1 | LP10 |
| HDAC | | | |
| HABA | Human Astrocyte | pSport 1 | LPI0 |
| HUFA HUFB | Ulcerative Colitis | pSport 1 | LP10 |
| HUFC | | | |
| HNTM | NTERA2 + retinoic acid, | pSport 1 | LP10 |
| | 14 days | | |
| HDQA | Primary Dendritic cells, | pSport 1 | LP10 |
| | CapFinder2, frac 1 | | |
| HDQM | Primary Dendritic Cells, | pSport 1 | LPI0 |
| | CapFinder, frac 2 | | |
| HLDX | Human Liver, | pSport 1 | LP10 |
| | normal,CapFinder | | |
| HULA HULB | Human Dermal Endothelial | pSport 1 | LP10 |
| HULC | Cells, untreated | | |
| HUMA | Human Dermal Endothelial | pSport 1 | LP10 |
| | cells,treated | | |
| HCJA | Human Stromal Endometrial | pSport 1 | LP10 |
| | fibroblasts, untreated | | |
| HCJM | Human Stromal endometrial | pSport 1 | LP10 |
| | fibroblasts, treated w/ estradiol | | |
| HEDA | Human Stromal endometrial | pSport 1 | LP10 |
| | fibroblasts, treated with | | |
| | progesterone | | |
| HFNA | Human ovary tumor cell | pSport 1 | LP10 |
| | OV350721 | | |
| HKGA HKGB | Merkel Cells | pSport 1 | LP10 |
| HKGC HKGD | | | |
| HISA HISB | Pancreas Islet Cell Tumor | pSport 1 | LP10 |
| HISC | | | |
| HLSA | Skin, burned | pSport 1 | LP10 |
| HBZA | Prostate,BPH, Lib 2 | pSport 1 | LP10 |
| HBZS | Prostate BPH, Lib 2, subtracted | pSport 1 | LP10 |
| HFIA HFIB | Synovial Fibroblasts | pSport 1 | LP10 |
| HFIC | (control) | | |
| HFIH HFII | Synovial hypoxia | pSport 1 | LP10 |
| HFIJ | | | |
| HFIT HFIU | Synovial IL-1/TNF stimulated | pSport 1 | LP10 |
| HFIV | | | |
| HGCA | Messangial cell, frac 1 | pSport 1 | LP10 |
| HMVA HMVB | Bone Marrow Stromal Cell, | pSport 1 | LP10 |
| HMVC | untreated | | |
| HFIX HFIY | Synovial Fibroblasts (Ill/TNF), | pSport 1 | LP10 |
| HFIZ | subt | | |
| HFOX HFOY | Synovial hypoxia-RSF | pSport 1 | LP10 |
| HFOZ | subtracted | | |
| HMQA HMQB | Human Activated Monocytes | Uni-ZAP XR | LP1 I |
| HMQC HMQD | | | |
| HLIA HLIB | Human Liver | pCMVSport | LP012 |
| HLIC | | 1 | |
| HHBA HHBB | Human Heart | pCMVSport | LP012 |
| HHBC HHBD | | 1 | |
| HHBE | | | |
| HBBA HBBB | Human Brain | pCMVSport | LP012 |
| | | 1 | |
| HLJA HLJB | Human Lung | pCMVSport | LP012 |
| HLJC HLJD | | 1 | |
| HLJE | | | |
| HOGA HOOB | Ovarian Tumor | pCMVSport | LP012 |
| HOOC | | 2.0 | |
| HTJM | Human Tonsils, Lib 2 | pCMVSport | LP012 |
| | | 2.0 | |
| HAMF HAMO | KMH2 | pCMV Sport | LP012 |
| | | 3.0 | |
| HAJA HAJB | L428 | pCMVSport | LP012 |
| HAJC | | 3.0 | |
| HWBA HWBB | Dendritic cells, pooled | pCMVSport | LP012 |
| HWBC HWBD | | 3.0 | |
| HWBE | | | |
| HWAA | Human Bone Marrow, treated | pCMVSport | LP012 |
| HWAB | | 3.0 | |
| HWAC | | | |
| HWAD | | | |
| HWAE | | | |
| HYAA HYAB | B Cell lymphoma | pCMVSport | LP012 |
| HYAC | | 3.0 | |
| HWHG | Healing groin wound, 6.5 hours | pCMVSport | LP012 |
| HWHH | post incision | 3.0 | |
| HWHI | | | |
| HWHP HWHQ | Healing groin wound; 7.5 hours | pCMVSport | LP012 |
| HWHR | post incision | 3.0 | |
| HARM | Healing groin wound - zero hr | pCMVSport | LP012 |
| | post-incision (control) | 3.0 | |
| HBIM | Olfactory epithelium; nasal | pCMVSport | LP012 |
| | cavity | 3.0 | |
| HWDA | Healing Abdomen wound; 70 & | pCMVSport | LP012 |
| | 90 min post incision | 3.0 | |
| HWEA | Healing Abdomen Wound; 15 | pCMVSport | LP012 |
| | days post incision | 3.0 | |
| HWJA | Healing Abdomen Wound; 21 & | pCMVSport | LP0~2 |
| | 29 days | 3.0 | |
| HNAL | Human Tongue, frac 2 | pSport 1 | LP012 |
| HMJA | H. Meniingima, M6 | pSport 1 | LP012 |
| HMKA HMKB | H. Meningima, M1 | pSport 1 | LP012 |
| HMKC HMKD | | | |
| HMKE | | | |
| HOFA | Ovarian Tumor I, OV5232 | pSport 1 | LP0t2 |
| HCFA HCFB | T-Cell PHA 16 hrs | pSport 1 | LP012 |
| HCFC HCFD | | | |
| HCFL HCFM | T-Cell PHA 24 hrs | pSport 1 | LP0t2 |
| HCFN HCFO | | | |
| HMMA | Spleen metastic melanoma | pSport 1 | LP012 |
| HMMB | | | |
| HMMC | | | |
| HTDA | Human Tonsil, Lib 3 | pSport 1 | LP0~2 |
| HDBA | Human Fetal Thymus | pSport 1 | LP012 |
| HDUA | Pericardium | pSport 1 | LP012 |
| HBZA | Prostate,BPH, Lib 2 | pSport 1 | LP012 |
| HWCA | Larynx tumor | pSport 1 | LP012 |
| HWKA | Normal lung | pSport 1 | LP012 |
| HSMB | Bone marrow stroma,treated | pSport 1 | LP012 |
| HBHM | Normal trachea | pSport 1 | LP012 |
| HLFC | Human Larynx | pSport 1 | LP0t2 |
| HLRB | Siebben Polyposis | pSport 1 | LP012 |
| HNIA | Mammary Gland | pSport 1 | LP012 |
| HNJB | Palate carcinoma | pSport 1 | LP012 |
| HNKA | Palate normal | pSport 1 | LP012 |
| HMZA | Pharynx carcinoma | pSport 1 | LP012 |
| HABG | Cheek Carcinoma | pSport 1 | LP012 |
| HMZM | Pharynx Carcinoma | pSport 1 | LP012 |
| HDRM | Larynx Carcinoma | pSport 1 | LP012 |
| HVAA | Pancreas normal PCA4 No | pSport 1 | LP012 |
| HICA | Tongue carcinoma | pSport 1 | LP012 |
| HUKA HUKB | Human Uterine Cancer | Lambda | LP013 |
| HUKC HUKD | | ZAP II | |
| HUKE | | | |
| HFFA | Human Fetal Brain, random | Lambda | LP013 |
| | primed | ZAP II | |
| HTUA | Activated T-cell labeled with 4- | Lambda | LP013 |
| | thioluri | ZAP II | |
| HBQA | Early Stage Human Brain, | Lambda | LP013 |
| | random primed | ZAP II | |
| HMEB | Human microvascular | Lambda | LP013 |
| | Endothelia cells, fract. B | ZAP II | |
| HUSH | Human Umbilical Vein | Lambda | LP013 |
| | Endothelia cells, fract. A, | ZAP II | |
| | re-excision | | |
| HLQC HLQD | Hepatocellular tumor, | Lambda | LP013 |
| | re-excision | ZAP II | |
| HTWJ HTWK | Resting T-cell, re-excision | Lambda | LP013 |
| HTWL | | ZAP II | |
| HF6S | Human Whole 6 week Old | pBluescript | LP013 |
| | Embryo (II), subt | | |
| HHPS | Human Hippocampus, | pBluescript | LP013 |
| | subtracted | | |
| HLIS | LNCAP, differential expression | pBluescript | LP013 |
| HLHS HLHT | Early Stage Human Lung, | pBluescript | LP013 |
| | Subtracted | | |
| HSUS | Supt cells, cyclohexamide | pBluescript | LP013 |
| | treated, subtracted | | |
| HSUT | Supt cells, cyclohexamide | pBluescript | LP013 |
| | treated, differentially expressed | | |
| HSDS | H. Striatum Depression, | pBluescript | LP013 |
| | subtracted | | |
| HPTZ | Human Pituitary, Subtracted | pBluescript | LP013 |
| | VII | | |
| HSDX | H. Striatum Depression, subt II | pBluescript | LP0t3 |
| HSDZ | H. Striatum Depression, subt | pBluescript | LP013 |
| HPBA HPBB | Human Pineal Gland | pBluescript | LP013 |
| HPBC HPBD | | SK- | |
| HPBE | | | |
| HRTA | Colorectal Tumor | pBluescript | LP013 |
| | | SK- | |
| HSBA HSBB | HSC 172 cells | pBluescript | LP013 |
| HSBC HSBM | | SK- | |
| HJAA HJAB | Jurkat T-cell GI phase | pBluescript | LP013 |
| HJAC HJAD | | SK- | |
| HJBA HJBB | Jurkat T-cell, 51 phase | pBluescript | LP013 |
| HJBC HJBD | | SK- | |
| HTNA HTNB | Human Thyroid | pBluescript | LP013 |
| | | SK- | |
| HAHA HAHB | Human Adult Heart | Uni-ZAP XR | LP013 |
| HE6A | Whole 6 week Old Embryo | Uni-ZAP XR | LP013 |
| HFCA HFCB | Human Fetal Brain | Uni-ZAP XR | LP013 |
| HFCC HFCD | | | |
| HFCE | | | |
| HFKC HFKD | Human Fetal Kidney | Uni-ZAP XR | LP013 |
| HFKE HFKF | | | |
| HFKG | | | |
| HGBA HGBD | Human Gall Bladder | Uni-ZAP XR | LP013 |
| HGBE HGBF | | | |
| HGBG | | | |
| HPRA HPRB | Human Prostate | Uni-ZAP XR | LP013 |
| HPRC HPRD | | | |
| HTEA HTEB | Human Testes | Uni-ZAP XR | LP013 |
| HTEC HTED | | | |
| HTEE | | | |
| HTTA HTTB | Human Testes Tumor | Uni-ZAP XR | LP013 |
| HTTC HTTD | | | |
| HTTE | | | |
| HYBA HYBB | Human Fetal Bone | Uni-ZAP XR | LP013 |
| HFLA | Human Fetal Liver | Uni-ZAP XR | LP013 |
| HHFB HHFC | Human Fetal Heart | Uni-ZAP XR | LP0L3 |
| HHFD HHFE | | | |
| HHFF | | | |
| HUVB HUVC | Human Umbilical Vein, | Uni-ZAP XR | LP013 |
| HUVD HUVE | End. remake | | |
| HTHB HTHC | Human Thymus | Uni-ZAP XR | LP013 |
| HTHD | | | |
| HSTA HSTB | Human Skin Tumor | Uni-ZAP XR | LP013 |
| HSTC HSTD | | | |
| HTAA HTAB | Human Activated T-cells | Uni-ZAP XR | LP013 |
| HTAC HTAD | | | |
| HTAE | | | |
| HFEA HFEB | Human Fetal Epithelium (skin) | Uni-ZAP XR | LP013 |
| HFEC | | | |
| HJPA HJPB | Human Jurkat Membrane | Uni-ZAP XR | LP0 13 |
| HJPC HJPD | Bound Polysomes | | |
| HESA | Human Epithelioid Sarcoma | Uni-ZAP XR | LP013 |
| HALS | Human Adult Liver, Subtracted | Uni-ZAP XR | LP0 13 |
| HFTA HFTB | Human Fetal Dura Mater | Uni-ZAP XR | LP0 13 |
| HFTC HFTD | | | |
| HCAA HCAB | Gem cells, cyclohexamide | Uni-ZAP XR | LP013 |
| HCAC | treated | | |
| HRGA HRGB | Raji Cells, cyclohexamide | Uni-ZAP XR | LP013 |
| HRGC HRGD | treated | | |
| HE9A HE9B | Nine Week Old Early Stage | Uni-ZAP XR | LP013 |
| HE9C HE9D | Human | | |
| HE9E | | | |
| HSFA | Human Fibrosarcoma | Uni-ZAP XR | LP0 13 |
| HATA HATB | Human Adrenal Gland Tumor | Uni-ZAP XR | LP013 |
| HATC HATD | | | |
| HATE | | | |
| HTRA | Human Trachea Tumor | Uni-ZAP XR | LP013 |
| HE2A HE2D | 12 Week Old Early Stage | Uni-ZAP XR | LP013 |
| HE2E HE2H | Human | | |
| HE2I | | | |
| HE2B HE2C | 12 Week Old Early Stage | Uni-ZAP XR | LP013 |
| HE2F HE2G | Human, II | | |
| HE2P | | | |
| HNEA HNEB | Human Neutrophil | Uni-ZAP XR | LP013 |
| HNEC HNED | | | |
| HNEE | | | |
| HBGA | Human Pnmary Breast Cancer | Uni-ZAP XR | LP013 |
| HPTS HPTT | Human Pituitary, subtracted | Uni-ZAP XR | LP013 |
| HTPU | | | |
| HMQA HMQB | Human Activated Monocytes | Uni-ZAP XR | LP013 |
| HMQC HMQD | | | |
| HOAA HOAB | Human Osteosarcoma | Uni-ZAP XR | LP013 |
| HOAC | | | |
| HTOA HTOD | human tonsils | Uni-ZAP XR | LP013 |
| HTOD HTOE | | | |
| HTOF HTOG | | | |
| HMGB | Human OB MG63 control | Uni-ZAP XR | LP013 |
| | fraction I | | |
| HOPB | Human OB HOS control | Uni-ZAP XR | LP013 |
| | fraction I | | |
| HOQB | Human OB HOS treated (1 nM | Uni-ZAP XR | LP013 |
| | E2) fraction I | | |
| HAUA HAUB | Amniotic Cells - TNF induced | Uni-ZAP XR | LP013 |
| HAUC | | | |
| HAQA HAQB | Amniotic Cells - Primary | Uni-ZAP XR | LP013 |
| HAQC HAQD | Culture | | |
| HROA HROC | HUMAN STOMACH | Uni-ZAP XR | LP013 |
| HBJA HBJB | HUMAN B CELL | Uni-ZAP XR | LP013 |
| HBJC HGJD | LYMPHOMA | | |
| HBJE | | | |
| HODA HODB | human ovarian cancer | Uni-ZAP XR | LP0L3 |
| HODC HODD | | | |
| HCPA | Corpus Callosum | Uni-ZAP XR | LP013 |
| HSOA | stomach cancer (human) | Uni-ZAP XR | LP013 |
| HERA | SKIN | Uni-ZAP XR | LP013 |
| HMDA | Brain-medulloblastoma | Uni-ZAP XR | LP013 |
| HGLA HGLB | Glioblastoma | Uni-ZAP XR | LP013 |
| HGLD | | | |
| HWTA HWTB | wilm's tumor | Uni-ZAP XR | LP013 |
| HWTC | | | |
| HEAA | H. Atrophic Endometrium | Uni-ZAP XR | LP013 |
| HAPN HAPO | Human Adult Pulmonary; re- | Uni-ZAP XR | LP013 |
| HAPP HAPQ | excision | | |
| HAPR | | | |
| HLTG HLTH | Human I-cell lymphoma; re- | Uni-ZAP XR | LP013 |
| | excision | | |
| HAHC HAHD | Human Adult Heart; re- | Uni-ZAP XR | LP013 |
| HAHE | excision | | |
| HAGA HAGB | Human Amygdala | Uni-ZAP XR | LP013 |
| HAGC HAGD | | | |
| HAGE | | | |
| HSJA HSJB | Smooth muscle-ILb induced | lini-ZAP XR | LP013 |
| HSJC | | | |
| HSHA HSHB | Smooth muscle, ILlb induced | Uni-ZAP XR | LP013 |
| HSHC | | | |
| HPWA HPWB | Prostate BPH | Uni-ZAP XR | LP013 |
| HPWC HPWD | | | |
| HPWE | | | |
| HPIA HPIB | LNCAP prostate cell line | Uni-ZAP XR | LP013 |
| HPIC | | | |
| HPJA HPJB | PC3 Prostate cell line | Uni-ZAP XR | LP013 |
| HPJC | | | |
| HBTA | Bone Marrow Stroma, TNF & | Uni-ZAP XR | LP013 |
| | LPS ind | | |
| HMCF HMCG | Macrophage-oxLDL; re- | Uni-ZAP XR | LP013 |
| HMCH HMCI | excision | | |
| HMCJ | | | |
| HAGG HAGH | Human Amygdala; re- | Uni-ZAP XR | LP013 |
| HAGI | excision | | |
| HACA | H. Adipose Tissue | Uni-ZAP XR | LP013 |
| HKFB | K562 + PMA (36 hrs), | ZAP Express | LP013 |
| | re-excision | | |
| HCWT HCWU | CD34 positive cells (cord | ZAP Express | LP013 |
| HCWV | blood) re-ex | | |
| HBWA | Whole brain | ZAP Express | LP013 |
| HBXA HBXB | Human Whole Brain #2 - | ZAP Express | LP013 |
| HBXC HBXD | Oligo dt > 1.5 Kb | | |
| HAVM | Temporal cortex-Alzheizmer | pT-Adv | LP014 |
| HAVT | Hippocampus, Alzheimer | pT-Adv | LP014 |
| | Subtracted | | |
| HHAS | CHME Cell Line | Uni-ZAP XR | LP014 |
| HAJR | Larynx normal | pSport 1 | LP014 |
| HWLE HWLF | Colon Normal | pSport 1 | LP014 |
| HWLG HWLH | | | |
| HCRM HCRN | Colon Carcinoma | pSport 1 | LP014 |
| HCRO | | | |
| HWLI HWLJ | Colon Normal | pSport 1 | LP014 |
| HWLK | | | |
| HWLQ HWLR | Colon Tumor | pSport 1 | LP014 |
| HWLS HWLT | | | |
| HBFM | Gastrocnemius Muscle | pSport 1 | LP014 |
| HBOD HBOE | Quadriceps Muscle | pSport 1 | LP014 |
| HBKD HBKE | Soleus Muscle | pSport 1 | LP014 |
| HCCM | Pancreatic Langerhans | pSport 1 | LP014 |
| HWGA | Larynx carcinoma | pSport 1 | LP014 |
| HWGM | Larynx carcinoma | pSport 1 | LP014 |
| HWGN | | | |
| HWLA | Normal colon | pSport 1 | LP014 |
| HWLB | | | |
| HWLC | | | |
| HWLM | Colon Tumor | pSport 1 | LP014 |
| HWLN | | | |
| HVAM HVAN | Pancreas Tumor | pSport 1 | LP014 |
| HVAO | | | |
| HWGQ | Larynx carcinoma | pSport 1 | LP014 |
| HAQM HAQN | Salivary Gland | pSport 1 | LP014 |
| HASM | Stomach; normal | pSport 1 | LP014 |
| HBCM | Uterus; normal | pSport 1 | LP014 |
| HCDM | Testis; normal | pSport 1 | LP014 |
| HDJM | Brain; normal | pSport 1 | LP014 |
| HEFM | Adrenal Gland, normal | pSport 1 | LP014 |
| HBAA | Rectum normal | pSport 1 | LP014 |
| HFDM | Rectum tumour | pSport 1 | LP014 |
| HGAM | Colon, normal | pSport 1 | LP014 |
| HHMM | Colon, tumour | pSport 1 | LP014 |
| HCLB HCLC | Human Lung Cancer | Lambda | LP015 |
| | | ZAP II | |
| HRLA | Li Cell line | ZAP Express | LP015 |
| HHAM | Hypothalamus, Alzheimers | pCMVSport | LP015 |
| | | 3.0 | |
| HKBA | Ku 812F Basophils Line | pSport 1 | LP015 |
| H525 | Saos2, Dexamethosome | pSport 1 | LP016 |
| | Treated | | |
| HASA | Lung Carcinoma A549 | pSport 1 | LP016 |
| | TNFalpha activated | | |
| HTFM | TF-1 Cell Line GM-CSF Treated | pSport 1 | LP016 |
| HYAS | Thyroid Tumour | pSport 1 | LP016 |
| HUTS | Larynx Normal | pSport 1 | LP016 |
| HXOA | Larynx Tumor | pSport 1 | LP016 |
| HEAH | Ea.hy.926 cell line | pSport 1 | LP016 |
| HINA | Adenocarcinoma Human | pSport 1 | LP016 |
| HRMA | Lung Mesothelium | pSport 1 | LP016 |
| HLCL | Human Pre-Differentiated | Uni-Zap XR | LP017 |
| | Adipocytes | | |
| HS2A | Saos2 Cells | pSport 1 | LP020 |
| HS2I | Saos2 Cells; Vitamin D3 | pSport 1 | LP020 |
| | Treated | | |
| HUCM | CHME Cell Line. untreated | pSport 1 | LP020 |
| HEPN | Aryepiglottis Normal | pSport 1 | LP020 |
| HPSN | Sinus Piniformis Tumour | pSport 1 | LP020 |
| HNSA | Stomach Normal | pSport 1 | LP020 |
| HNSM | Stomach Tumour | pSport 1 | LP020 |
| HNLA | Liver Normal Met5No | pSport 1 | LP020 |
| HUTA | Liver Tumour Met 5 Tu | pSport 1 | LP020 |
| HOCN | Colon Normal | pSport 1 | LP020 |
| HOCT | Colon Tumor | pSport 1 | LP020 |
| HTNT | Tongue Tumour | pSport 1 | LP020 |
| HLXN | Larynx Normal | p Sport 1 | LP020 |
| HLXT | Larynx Tumour | pSport 1 | LP020 |
| HTYN | Thymus | pSport 1 | LP020 |
| HPLN | Placenta | pSport 1 | LP020 |
| HTNG | Tongue Normal | pSport 1 | LP020 |
| HZAA | Thyroid Normal (SDCA2 No) | pSport 1 | LP020 |
| HWES | Thyroid Thyroiditis | pSport 1 | LP020 |
| HFHD | Ficolled Human Stromal | pTrip1Ex2 | LP021 |
| | Cells, 5Fu treated | | |
| HFHM, | Ficolled Human Stromal | pTrip1Ex2 | LP021 |
| HFHN | Cells, Untreated | | |
| HPCI | Rep G2 Cells, lambda | lambda Zap- | LP021 |
| | library | CMV XR | |
| HBCA, HBCB, | H. Lymph node breast Cancer | Uni-ZAP XR | LP021 |
| HBCC | | | |
| HCOK | Chondrocytes | pSPORT1 | LP022 |
| HDCA, | Dendritic Cells From CD34 | pSPORT1 | LP022 |
| HDCB, | | | |
| HDCC | Cells | | |
| HDMA, | CD40 activated monocyte | pSPORT1 | LP022 |
| HDMB | dedritic cells | | |
| HDDM, | LPS activated derived | pSPORT1 | LP022 |
| HDDN, | | | |
| HDDO | dendritic cells | | |
| HPCR | Hep G2 Cells, PCR | lambda Zap- | LP022 |
| | library | CMV XR | |
| HAAA, | Lung, Cancer (4005313A3): | pSPORT1 | LP022 |
| HAAB, HAAC | Invasive Poorly | | |
| | Differentiated Lung | | |
| | Adenocarcinoma | | |
| HIPA, HIPB, | Lung, Cancer (4005163 B7): | pSPORT1 | LP022 |
| HIPC | Invasive, Poorly Diff. | | |
| | Adenocarcinoma, Metastatic | | |
| HOOH, HOOI | Ovary, Cancer: (4004562 B6) | pSPORT1 | LP022 |
| | Papillary Serous Cystic | | |
| | Neoplasm, | | |
| | Low Malignant Pot | | |
| HIDA | Lung, Normal (4005313 B1) | pSPORT1 | LP022 |
| HUJA, HUJB, | B-Cells | pCMVSport | LP022 |
| HUJC, HUJD, | 3.0 | | |
| HUJE | | | |
| HNOA, | Ovary, Normal: (9805C040R) | pSPORT1 | LP022 |
| HNOB, | | | |
| HNOC, HNOD | | | |
| HNLM | Lung, Normal: (4005313 B1) | pSPORT1 | LP022 |
| HSCL | Stromal Cells | pSPORT1 | LP022 |
| HAAX | Lung, Cancer: (4005313 A3) | pSPORT1 | LP022 |
| | Invasive Poorly-differentiated | | |
| | Metastatic lung adenocarcinoma | | |
| HUUA, | B-cells (unstimulated) | pTrip1Ex2 | LP022 |
| HUUB, | | | |
| HUUC, HUUD | | | |
| HWWA, | B-cells (stimulated) | pSPORT1 | LP022 |
| HWWB, | | | |
| HWWC, | | | |
| HWWD, | | | |
| HWWE, | | | |
| HWWF, | | | |
| HWWG | | | |
| HCCC | Colon, Cancer: (9808C064R) | pCMVSport | LP023 |
| | | 3.0 | |
| HPDO HPDP | Ovary, Cancer (9809C332): | pSport 1 | LP023 |
| HPDQ HPDR | Poorly differentiated | | |
| HPD | adenocarcinoma | | |
| HPCO HPCP | Ovary, Cancer (15395A1F): | pSport 1 | LP023 |
| HPCQ HPCT | Grade II | | |
| | Papillary Carcinoma | | |
| HOCM HOCO | Ovary, Cancer: (15799A1F) | pSport 1 | LP023 |
| HOCP HOCQ | Poorly differentiated | | |
| | carcinoma | | |
| HCBM HCBN | Breast, Cancer: (4004943 A5) | pSport 1 | LP023 |
| HCBO | | | |
| HNBT HNBU | Breast, Normal: (4005 522B2) | pSport 1 | LP023 |
| HNBV | | | |
| HBCP HBCQ | Breast, Cancer: (4005522 A2) | pSport 1 | LP023 |
| HBCJ | Breast, Cancer: (9806C012R) | pSport 1 | LP023 |
| HSAM HSAN | Stromal cells 3.88 | pSport 1 | LP023 |
| HVCA HVCB | Ovary, Cancer: (4004332 A2) | pSport 1 | LP023 |
| HVCC HVCD | | | |
| HSCK HSEN | Stromal cells (HBM3.18) | pSport 1 | LP023 |
| HSEO | | | |
| HSCP HSCQ | stromal cell clone 2.5 | pSport 1 | LP023 |
| HUXA | Breast Cancer: (4005385 A2) | pSport 1 | LP023 |
| HCOM HCON | Ovary, Cancer (4004650 A3): | pSport 1 | LP023 |
| HCOO HCOP | Well-Differentiated | | |
| HCOQ | Micropapillary Serous | | |
| | Carcinoma | | |
| HBNM | Breast, Cancer: (9802C020E) | pSport 1 | LP023 |
| HVVA HVVB | Human Bone Marrow, treated | pSport 1 | LP023 |
| HVVC HVVD | | | |
| HVVE | | | |

[0865] Two nonlimiting examples are provided below for isolating a particular clone from the deposited sample of plasmid cDNAs cited for that clone in Table 7. First, a plasmid is directly isolated by screening the clones using a polynucleotide probe corresponding to the nucleotide sequence of SEQ ID NO:X.

[0866] Particularly, a specific polynucleotide with 30-40 nucleotides is synthesized using an Applied Biosystems DNA synthesizer according to the sequence reported. The oligonucleotide is labeled, for instance, with ³²P-γ-ATP using T4 polynucleotide kinase and purified according to routine methods. (E.g., Maniatis et al., Molecular Cloning: A Laboratory Manual, Cold Spring Harbor Press, Cold Spring, N.Y. (1982).) The plasmid mixture is transformed into a suitable host, as indicated above (such as XL-1 Blue (Stratagene)) using techniques known to those of skill in the art, such as those provided by the vector supplier or in related publications or patents cited above. The transformants are plated on 1.5% agar plates (containing the appropriate selection agent, e.g., ampicillin) to a density of about 150 transformants (colonies) per plate. These plates are screened using Nylon membranes according to routine methods for bacterial colony screening (e.g., Sambrook et al., Molecular Cloning: A Laboratory Manual, 2nd Edit., (1989), Cold Spring Harbor Laboratory Press, pages 1.93 to 1. 104), or other techniques known to those of skill in the art.

[0867] Alternatively, two primers of 17-20 nucleotides derived from both ends of the nucleotide sequence of SEQ ID NO:X are synthesized and used to amplify the desired cDNA using the deposited cDNA plasmid as a template. The polymerase chain reaction is carried out under routine conditions, for instance, in 25 μl of reaction mixture with 0.5 ug of the above cDNA template. A convenient reaction mixture is 1.5-5 mM MgCl₂, 0.01% (w/v) gelatin, 20 μM each of dATP, dCTP, dGTP, dTTP, 25 pmol of each primer and 0.25 Unit of Taq polymerase. Thirty five cycles of PCR (denaturation at 94° C. for 1 min; annealing at 55° C. for 1 min; elongation at 72° C. for 1 min) are performed with a Perkin-Elmer Cetus automated thermal cycler. The amplified product is analyzed by agarose gel electrophoresis and the DNA band with expected molecular weight is excised and purified. The PCR product is verified to be the selected sequence by subcloning and sequencing the DNA product.

[0868] Several methods are available for the identification of the 5′ or 3′ non-coding portions of a gene which may not be present in the deposited clone. These methods include but are not limited to, filter probing, clone enrichment using specific probes, and protocols similar or identical to 5′ and 3′ “RACE” protocols which are well known in the art. For instance, a method similar to 5′ RACE is available for generating the missing 5′ end of a desired full-length transcript. (Fromont-Racine et al., Nucleic Acids Res. 21(7):1683-1684 (1993).)

[0869] Briefly, a specific RNA oligonucleotide is ligated to the 5′ ends of a population of RNA presumably containing full-length gene RNA transcripts. A primer set containing a primer specific to the ligated RNA oligonucleotide and a primer specific to a known sequence of the gene of interest is used to PCR amplify the 5′ portion of the desired full-length gene. This amplified product may then be sequenced and used to generate the full length gene.

[0870] This above method starts with total RNA isolated from the desired source, although poly-A+ RNA can be used. The RNA preparation can then be treated with phosphatase if necessary to eliminate 5′ phosphate groups on degraded or damaged RNA which may interfere with the later RNA ligase step. The phosphatase should then be inactivated and the RNA treated with tobacco acid pyrophosphatase in order to remove the cap structure present at the 5′ ends of messenger RNAs. This reaction leaves a 5′ phosphate group at the 5′ end of the cap cleaved RNA which can then be ligated to an RNA oligonucleotide using T4 RNA ligase.

[0871] This modified RNA preparation is used as a template for first strand cDNA synthesis using a gene specific oligonucleotide. The first strand synthesis reaction is used as a template for PCR amplification of the desired 5′ end using a primer specific to the ligated RNA oligonucleotide and a primer specific to the known sequence of the gene of interest. The resultant product is then sequenced and analyzed to confirm that the 5′ end sequence belongs to the desired gene.

### Example 2

### Isolation of Genomic Clones Corresponding to a Polynucleotide

[0872] A human genomic P1 library (Genomic Systems, Inc.) is screened by PCR using primers selected for the sequence corresponding to SEQ ID NO:X according to the method described in Example 1. (See also, Sambrook et al., Molecular Cloning: A Laboratory Manual, 2nd Edn., (1989), Cold Spring Harbor Laboratory Press).

### Example 3

### Tissue Specific Expression Analysis

[0873] The Human Genome Sciences, Inc. (HGS) database is derived from sequencing tissue and/or disease specific cDNA libraries. Libraries generated from a particular tissue are selected and the specific tissue expression pattern of EST groups or assembled contigs within these libraries is determined by comparison of the expression patterns of those groups or contigs within the entire database. ESTs and assembled contigs which show tissue specific expression are selected.

[0874] The original clone from which the specific EST sequence was generated, or in the case of an assembled contig, the clone from which the 5′ most EST sequence was generated, is obtained from the catalogued library of clones and the insert amplified by PCR using methods known in the art. The PCR product is denatured and then transferred in 96 or 384 well format to a nylon membrane (Schleicher and Scheull) generating an array filter of tissue specific clones. Housekeeping genes, maize genes, and known tissue specific genes are included on the filters. These targets can be used in signal normalization and to validate assay sensitivity. Additional targets are included to monitor probe length and specificity of hybridization.

[0875] Radioactively labeled hybridization probes are generated by first strand cDNA synthesis per the manufacturer's instructions (Life Technologies) from mRNA/RNA samples prepared from the specific tissue being analyzed (e.g., liver, liver cancer,etc.). The hybridization probes are purified by gel exclusion chromatography, quantitated, and hybridized with the array filters in hybridization bottles at 65° C. overnight. The filters are washed under stringent conditions and signals are captured using a Fuji phosphorimager.

[0876] Data is extracted using AIS software and following background subtraction, signal normalization is performed. This includes a normalization of filter-wide expression levels between different experimental runs. Genes that are differentially expressed in the tissue of interest are identified.

### Example 4

### Chromosomal Mapping of the Polynucleotides

[0877] An oligonucleotide primer set is designed according to the sequence at the 5′ end of SEQ ID NO:X. This primer preferably spans about 100 nucleotides. This primer set is then used in a polymerase chain reaction under the following set of conditions: 30 seconds, 95° C.; 1 minute, 56° C.; 1 minute, 70° C. This cycle is repeated 32 times followed by one 5 minute cycle at 70° C. Human, mouse, and hamster DNA is used as template in addition to a somatic cell hybrid panel containing individual chromosomes or chromosome fragments (Bios, Inc). The reactions are analyzed on either 8% polyacrylamide gels or 3.5% agarose gels. Chromosome mapping is determined by the presence of an approximately 100 bp PCR fragment in the particular somatic cell hybrid.

### Example 5

### Bacterial Expression of a Polypeptide

[0878] A polynucleotide encoding a polypeptide of the present invention is amplified using PCR oligonucleotide primers corresponding to the 5′ and 3′ ends of the DNA sequence, as outlined in Example 1, to synthesize insertion fragments. The primers used to amplify the cDNA insert should preferably contain restriction sites, such as BamHI and XbaI, at the 5′ end of the primers in order to clone the amplified product into the expression vector. For example, BamHI and XbaI correspond to the restriction enzyme sites on the bacterial expression vector pQE-9. (Qiagen, Inc., Chatsworth, Calif.). This plasmid vector encodes antibiotic resistance (Amp^{r}), a bacterial origin of replication (ori), an IPTG-regulatable promoter/operator (P/O), a ribosome binding site (RBS), a 6-histidine tag (6-His), and restriction enzyme cloning sites.

[0879] The pQE-9 vector is digested with BamHI and XbaI and the amplified fragment is ligated into the pQE-9 vector maintaining the reading frame initiated at the bacterial RBS. The ligation mixture is then used to transform the E. coli strain M15/rep4 (Qiagen, Inc.) which contains multiple copies of the plasmid pREP4, which expresses the lacI repressor and also confers kanamycin resistance (Kan^{r}. Transformants are identified by their ability to grow on LB plates and ampicillin/kanamycin resistant colonies are selected. Plasmid DNA is isolated and confirmed by restriction analysis.

[0880] Clones containing the desired constructs are grown overnight (O/N) in liquid culture in LB media supplemented with both Amp (100 ug/ml) and Kan (25 μg/ml). The O/N culture is used to inoculate a large culture at a ratio of 1:100 to 1:250. The cells are grown to an optical density 600 (O.D.⁶⁰⁰) of between 0.4 and 0.6. IPTG (Isopropyl-B-D-thiogalacto pyranoside) is then added to a final concentration of 1 nM. IPTG induces by inactivating the lacI repressor, clearing the P/O leading to increased gene expression.

[0881] Cells are grown for an extra 3 to 4 hours. Cells are then harvested by centrifugation (20 mins at 600×g). The cell pellet is solubilized in the chaotropic agent 6 Molar Guanidine HCl by stirring for 3-4 hours at 4° C. The cell debris is removed by centrifugation, and the supernatant containing the polypeptide is loaded onto a nickel-nitrilo-tri-acetic acid (“Ni-NTA”)affinity resin column (available from QIAGEN, Inc., supra). Proteins with a 6×His tag bind to the Ni-NTA resin with high affinity and can be purified in a simple one-step procedure (for details see: The QIAexpressionist (1995) QIAGEN, Inc., supra).

[0882] Briefly, the supernatant is loaded onto the column in 6 M guanidine-HCl, pH 8. The column is first washed with 10 volumes of 6 M guanidine-HCl, pH 8, then washed with 10 volumes of 6 M guanidine-HCl pH 6, and finally the polypeptide is eluted with 6 M guanidine-HCl, pH 5.

[0883] The purified protein is then renatured by dialyzing it against phosphate-buffered saline (PBS) or 50 mM Na-acetate, pH 6 buffer plus 200 mM NaCl. Alternatively, the protein can be successfully refolded while immobilized on the Ni-NTA column. The recommended conditions are as follows: renature using a linear 6M-1M urea gradient in 500 mM NaCl, 20% glycerol, 20 mM Tris/HCl pH 7.4, containing protease inhibitors. The renaturation should be performed over a period of 1.5 hours or more. After renaturation the proteins are eluted by the addition of 250 mM immidazole. Immidazole is removed by a final dialyzing step against PBS or 50 mM sodium acetate pH 6 buffer plus 200 mM NaCl. The purified protein is stored at 4° C. or frozen at −80° C.

[0884] In addition to the above expression vector, the present invention further includes an expression vector, called pHE4a (ATCC Accession Number 209645, deposited on Feb. 25, 1998) which contains phage operator and promoter elements operatively linked to a polynucleotide of the present invention. This vector contains: 1) a neomycinphosphotransferase gene as a selection marker, 2) an E. coli origin of replication, 3) a T5 phage promoter sequence, 4) two lac operator sequences, 5) a Shine-Delgamo sequence, and 6) the lactose operon repressor gene (laclq). The origin of replication (oriC) is derived from pUC19 (LTI, Gaithersburg, Md.). The promoter and operator sequences are made synthetically.

[0885] DNA can be inserted into the pHE4a by restricting the vector with Ndel and XbaI, BamHI, XhoI, or Asp718, running the restricted product on a gel, and isolating the larger fragment (the stuffer fragment should be about 310 base pairs). The DNA insert is generated according to the PCR protocol described in Example 1, using PCR primers having restriction sites for NdeI (5′ primer) and XbaI, BamHI, XhoI, or Asp718 (3′ primer). The PCR insert is gel purified and restricted with compatible enzymes. The insert and vector are ligated according to standard protocols.

[0886] The engineered vector could easily be substituted in the above protocol to express protein in a bacterial system.

### Example 6

### Purification of a Polypeptide from an Inclusion Body

[0887] The following alternative method can be used to purify a polypeptide expressed in E. coli when it is present in the form of inclusion bodies. Unless otherwise specified, all of the following steps are conducted at 4-10° C.

[0888] Upon completion of the production phase of the E. coli fermentation, the cell culture is cooled to 4-1 0° C. and the cells harvested by continuous centrifugation at 15,000 rpm (Heraeus Sepatech). On the basis of the expected yield of protein per unit weight of cell paste and the amount of purified protein required, an appropriate amount of cell paste, by weight, is suspended in a buffer solution containing 100 mM Tris, 50 mM EDTA, pH 7.4. The cells are dispersed to a homogeneous suspension using a high shear mixer.

[0889] The cells are then lysed by passing the solution through a microfluidizer (Microfuidics, Corp. or APV Gaulin, Inc.) twice at 4000-6000 psi. The homogenate is then mixed with NaCl solution to a final concentration of 0.5 M NaCl, followed by centrifugation at 7000×g for 15 min. The resultant pellet is washed again using 0.5M MaCl, 100 mM Tris, 50 mM EDTA, pH 7.4.

[0890] The resulting washed inclusion bodies are solubilized with 1.5 M guanidine hydrochloride (GuHCl) for 2-4 hours. After 7000×g centrifugation for 15 min., the pellet is discarded and the polypeptide containing supernatant is incubated at 4° C. overnight to allow further GuHCl extraction.

[0891] Following high speed centrifugation (30,000×g) to remove insoluble particles, the GuHCl solubilized protein is refolded by quickly mixing the GuHCl extract with 20 volumes of buffer containing 50 mM sodium, pH 4.5, 150 mM NaCl, 2 nM EDTA by vigorous stirring. The refolded diluted protein solution is kept at 4° C. without mixing for 12 hours prior to further purification steps.

[0892] To clarify the refolded polypeptide solution, a previously prepared tangential filtration unit equipped with 0.16 μm membrane filter with appropriate surface area (e.g., Filtron), equilibrated with 40 mM sodium acetate, pH 6.0 is employed. The filtered sample is loaded onto a cation exchange resin (e.g., Poros HS-50, Perseptive Biosystems). The column is washed with 40 mM sodium acetate, pH 6.0 and eluted with 250 mM, 500 mM, 1000 mM, and 1500 mM NaCl in the same buffer, in a stepwise manner. The absorbance at 280 nm of the effluent is continuously monitored. Fractions are collected and further analyzed by SDS-PAGE.

[0893] Fractions containing the polypeptide are then pooled and mixed with 4 volumes of water. The diluted sample is then loaded onto a previously prepared set of tamdem columns of strong anion (Poros HQ-50, Perseptive Biosystems) and weak anion (Poros CM-20, Perseptive Biosystems) exchange resins. The columns are equilibrated with 40 mM sodium acetate, pH 6.0. Both columns are washed with 40 mM sodium acetate, pH 6.0, 200 mM NaCl. The CM-20 column is then eluted using a 10 column volume linear gradient ranging from 0.2 M NaCl, 50 mM sodium acetate, pH 6.0 to 1.0 M NaCl, 50 mM sodium acetate, pH 6.5. Fractions are collected under constant A₂₈₀ monitoring of the effluent. Fractions containing the polypeptide (determined, for instance, by 16% SDS-PAGE) are then pooled.

[0894] The resultant polypeptide should exhibit greater than 95% purity after the above refolding and purification steps. No major contaminant bands should be observed from Commassie blue stained 16% SDS-PAGE gel when 5 μg of purified protein is loaded. The purified protein can also be tested for endotoxin/LPS contamination, and typically the LPS content is less than 0.1 ng/ml according to LAL assays.

### Example 7

### Cloning and Expression of a Polypeptide in a Baculovirus Expression System

[0895] In this example, the plasmid shuttle vector pA2 is used to insert a polynucleotide into a baculovirus to express a polypeptide. This expression vector contains the strong polyhedrin promoter of the Autographa californica nuclear polyhedrosis virus (AcMNPV) followed by convenient restriction sites such as BamHI, Xba I and Asp718. The polyadenylation site of the simian virus 40 (“SV40”) is used for efficient polyadenylation. For easy selection of recombinant virus, the plasmid contains the beta-galactosidase gene from E. coli under control of a weak Drosophila promoter in the same orientation, followed by the polyadenylation signal of the polyhedrin gene. The inserted genes are flanked on both sides by viral sequences for cell-mediated homologous recombination with wild-type viral DNA to generate a viable virus that express the cloned polynucleotide.

[0896] Many other baculovirus vectors can be used in place of the vector above, such as pAc373, pVL941, and pAcIM1, as one skilled in the art would readily appreciate, as long as the construct provides appropriately located signals for transcription, translation, secretion and the like, including a signal peptide and an in-frame AUG as required. Such vectors are described, for instance, in Luckow et al., Virology 170:31-39 (1989).

[0897] Specifically, the cDNA sequence contained in the deposited clone, including the AUG initiation codon, is amplified using the PCR protocol described in Example 1. If a naturally occurring signal sequence is used to produce the polypeptide of the present invention, the pA2 vector does not need a second signal peptide. Alternatively, the vector can be modified (pA2 GP) to include a baculovirus leader sequence, using the standard methods described in Summers et al., “A Manual of Methods for Baculovirus Vectors and Insect Cell Culture Procedures,” Texas Agricultural Experimental Station Bulletin No. 1555 (1987).

[0898] The amplified fragment is isolated from a 1% agarose gel using a commercially available kit (“Geneclean,” BIO 101 Inc., La Jolla, Calif.). The fragment then is digested with appropriate restriction enzymes and again purified on a 1% agarose gel.

[0899] The plasmid is digested with the corresponding restriction enzymes and optionally, can be dephosphorylated using calf intestinal phosphatase, using routine procedures known in the art. The DNA is then isolated from a 1% agarose gel using a commercially available kit (“Geneclean” BIO 101 Inc., La Jolla, Calif.).

[0900] The fragment and the dephosphorylated plasmid are ligated together with T4 DNA ligase. E. coli HB101 or other suitable E. coli hosts such as XL-1 Blue (Stratagene Cloning Systems, La Jolla, Calif.) cells are transformed with the ligation mixture and spread on culture plates. Bacteria containing the plasmid are identified by digesting DNA from individual colonies and analyzing the digestion product by gel electrophoresis. The sequence of the cloned fragment is confirmed by DNA sequencing.

[0901] Five μg of a plasmid containing the polynucleotide is co-transfected with 1.0 μg of a commercially available linearized baculovirus DNA (“BaculoGold™ baculovirus DNA”, Pharmingen, San Diego, Calif.), using the lipofection method described by Felgner et al., Proc. Natl. Acad. Sci. USA 84:7413-7417 (1987). One μg of BaculoGold™ virus DNA and 5 μg of the plasmid are mixed in a sterile well of a microtiter plate containing 50 μl of serum-free Grace's medium (Life Technologies Inc., Gaithersburg, Md.). Afterwards, 10 μl Lipofectin plus 90 μl Grace's medium are added, mixed and incubated for 15 minutes at room temperature. Then the transfection mixture is added drop-wise to Sf9 insect cells (ATCC CRL 1711) seeded in a 35 mm tissue culture plate with 1 ml Grace's medium without serum. The plate is then incubated for 5 hours at 27° C. The transfection solution is then removed from the plate and 1 ml of Grace's insect medium supplemented with 10% fetal calf serum is added. Cultivation is then continued at 27° C. for four days.

[0902] After four days the supernatant is collected and a plaque assay is performed, as described by Summers and Smith, supra. An agarose gel with “Blue Gal” (Life Technologies Inc., Gaithersburg) is used to allow easy identification and isolation of gal-expressing clones, which produce blue-stained plaques. (A detailed description of a “plaque assay” of this type can also be found in the user's guide for insect cell culture and baculovirology distributed by Life Technologies Inc., Gaithersburg, page 9-10.) After appropriate incubation, blue stained plaques are picked with the tip of a micropipettor (e.g., Eppendorf). The agar containing the recombinant viruses is then resuspended in a microcentrifuge tube containing 200 μl of Grace's medium and the suspension containing the recombinant baculovirus is used to infect Sf9 cells seeded in 35 mm dishes. Four days later the supernatants of these culture dishes are harvested and then they are stored at 4° C.

[0903] To verify the expression of the polypeptide, Sf9 cells are grown in Grace's medium supplemented with 10% heat-inactivated FBS. The cells are infected with the recombinant baculovirus containing the polynucleotide at a multiplicity of infection (“MOI”)of about 2. If radiolabeled proteins are desired, 6 hours later the medium is removed and is replaced with SF900 II medium minus methionine and cysteine (available from Life Technologies Inc., Rockville, Md.). After 42 hours, 5 μCi of ³⁵S-methionine and 5 μCi ³⁵S-cysteine (available from Amersham) are added. The cells are further incubated for 16 hours and then are harvested by centrifugation. The proteins in the supernatant as well as the intracellular proteins are analyzed by SDS-PAGE followed by autoradiography (if radiolabeled).

[0904] Microsequencing of the amino acid sequence of the amino terminus of purified protein may be used to determine the amino terminal sequence of the produced protein.

### Example 8

### Expression of a Polypeptide in Mammalian Cells

[0905] The polypeptide of the present invention can be expressed in a mammalian cell. A typical mammalian expression vector contains a promoter element, which mediates the initiation of transcription of mRNA, a protein coding sequence, and signals required for the termination of transcription and polyadenylation of the transcript. Additional elements include enhancers, Kozak sequences and intervening sequences flanked by donor and acceptor sites for RNA splicing. Highly efficient transcription is achieved with the early and late promoters from SV40, the long terminal repeats (LTRs) from Retroviruses, e.g., RSV, HTLVI, HIVI and the early promoter of the cytomegalovirus (CMV). However, cellular elements can also be used (e.g., the human actin promoter).

[0906] Suitable expression vectors for use in practicing the present invention include, for example, vectors such as pSVL and pMSG (Pharmacia, Uppsala, Sweden), pRSVcat (ATCC 37152), pSV2dhfr (ATCC 37146), pBC12MI (ATCC 67109), pCMVSport 2.0, and pCMVSport 3.0. Mammalian host cells that could be used include, human Hela, 293, H9 and Jurkat cells, mouse NIH3T3 and C127 cells, Cos 1, Cos 7 and CV1, quail QC1-3 cells, mouse L cells and Chinese hamster ovary (CHO) cells.

[0907] Alternatively, the polypeptide can be expressed in stable cell lines containing the polynucleotide integrated into a chromosome. The co-transfection with a selectable marker such as DHFR, gpt, neomycin, or hygromycin allows the identification and isolation of the transfected cells.

[0908] The transfected gene can also be amplified to express large amounts of the encoded protein. The DHFR (dihydrofolate reductase) marker is useful in developing cell lines that carry several hundred or even several thousand copies of the gene of interest. (See, e.g., Alt, F. W., et al., J. Biol. Chem. 253:1357-1370 (1978); Hamlin, J. L. and Ma, C., Biochem. et Biophys. Acta, 1097:107-143 (1990); Page, M. J. and Sydenham, M. A., Biotechnology 9:64-68 (1991).) Another useful selection marker is the enzyme glutamine synthase (GS) (Murphy et al., Biochem J. 227:277-279 (1991); Bebbington et al., Bio/Technology 10:169-175 (1992). Using these markers, the mammalian cells are grown in selective medium and the cells with the highest resistance are selected. These cell lines contain the amplified gene(s) integrated into a chromosome. Chinese hamster ovary (CHO) and NSO cells are often used for the production of proteins.

[0909] Derivatives of the plasmid pSV2-dhfr (ATCC Accession No. 37146), the expression vectors pC4 (ATCC Accession No. 209646) and pC6 (ATCC Accession No.209647) contain the strong promoter (LTR) of the Rous Sarcoma Virus (Cullen et al,. Molecular and Cellular Biology, 438-447 (March, 1985)) plus a fragment of the CMV-enhancer (Boshart et al., Cell 41:521-530 (1985).) Multiple cloning sites, e.g., with the restriction enzyme cleavage sites BamHI, XbaI and Asp718, facilitate the cloning of the gene of interest. The vectors also contain the 3′ intron, the polyadenylation and termination signal of the rat preproinsulin gene, and the mouse DHFR gene under control of the SV40 early promoter.

[0910] Specifically, the plasmid pC6, for example, is digested with appropriate restriction enzymes and then dephosphorylated using calf intestinal phosphates by procedures known in the art. The vector is then isolated from a 1% agarose gel.

[0911] A polynucleotide of the present invention is amplified according to the protocol outlined in Example 1. If a naturally occurring signal sequence is used to produce the polypeptide of the present invention, the vector does not need a second signal peptide. Alternatively, if a naturally occurring signal sequence is not used, the vector can be modified to include a heterologous signal sequence. (See, e.g., international Publication No. WO 96/34891.)

[0912] The amplified fragment is isolated from a 1% agarose gel using a commercially available kit (“Geneclean,” BIO 101 Inc., La Jolla, Calif.). The fragment then is digested with appropriate restriction enzymes and again purified on a 1% agarose gel.

[0913] The amplified fragment is then digested with the same restriction enzyme and purified on a 1% agarose gel. The isolated fragment and the dephosphorylated vector are then ligated with T4 DNA ligase. E. coli HB101 or XL-1 Blue cells are then transformed and bacteria are identified that contain the fragment inserted into plasmid pC6 using, for instance, restriction enzyme analysis.

[0914] Chinese hamster ovary cells lacking an active DHFR gene is used for transfection. Five μg of the expression plasmid pC6 or pC4 is cotransfected with 0.5 μg of the plasmid pSVneo using lipofectin (Felgner et al., supra). The plasmid pSV2-neo contains a dominant selectable marker, the neo gene from Tn5 encoding an enzyme that confers resistance to a group of antibiotics including G418. The cells are seeded in alpha minus MEM supplemented with 1 mg/ml G418. After 2 days, the cells are trypsinized and seeded in hybridoma cloning plates (Greiner, Germany) in ha minus MEM supplemented with 10, 25, or 50 ng/ml of methotrexate plus 1 mg/ml G418. After about 10-14 days single clones are trypsinized and then seeded in 6-well petri dishes or 10 ml flasks using different concentrations of methotrexate (50 nM, 100 nM, 200 nM, 400 nM, 800 nM). Clones growing at the highest concentrations of methotrexate are then transferred to new 6-well plates containing even higher concentrations of methotrexate (1 μM, 2 μM, 5 μM, 10 mM, 20 mM). The same procedure is repeated until clones are obtained which grow at a concentration of 100-200 μM. Expression of the desired gene product is analyzed, for instance, by SDS-PAGE and Western blot or by reversed phase HPLC analysis.

### Example 9

### Protein Fusions

[0915] The polypeptides of the present invention are preferably fused to other proteins. These fusion proteins can be used for a variety of applications. For example, fusion of the present polypeptides to His-tag, HA-tag, protein A, IgG domains, and maltose binding protein facilitates purification. (See Example 5; see also EP A 394,827; Traunecker, et al., Nature 331:84-86 (1988).) Similarly, fusion to IgG-1, IgG-3, and albumin increases the halflife time in vivo. Nuclear localization signals fused to the polypeptides of the present invention can target the protein to a specific subcellular localization, while covalent heterodimer or homodimers can increase or decrease the activity of a fusion protein. Fusion proteins can also create chimeric molecules having more than one function. Finally, fusion proteins can increase solubility and/or stability of the fused protein compared to the non-fused protein. All of the types of fusion proteins described above can be made by modifying the following protocol, which outlines the fusion of a polypeptide to an IgG molecule, or the protocol described in Example 5.

[0916] Briefly, the human Fc portion of the IgG molecule can be PCR amplified, using primers that span the 5′ and 3′ ends of the sequence described below. These primers also should have convenient restriction enzyme sites that will facilitate cloning into an expression vector, preferably a mammalian expression vector.

[0917] For example, if pC4 (ATCC Accession No. 209646) is used, the human Fc portion can be ligated into the BamHI cloning site. Note that the 3′ BamHI site should be destroyed. Next, the vector containing the human Fc portion is re-restricted with BamHI, linearizing the vector, and a polynucleotide of the present invention, isolated by the PCR protocol described in Example 1, is ligated into this BamHI site. Note that the polynucleotide is cloned without a stop codon, otherwise a fusion protein will not be produced.

[0918] If the naturally occurring signal sequence is used to produce the polypeptide of the present invention, pC4 does not need a second signal peptide. Alternatively, if the naturally occurring signal sequence is not used, the vector can be modified to include a heterologous signal sequence. (See, e.g., International Publication No. WO 96/34891.)

| | |
|---|---|
| Human IgG Fc region: | |
| GGGATCCGGAGCCCAAATCTTCTGACAAAACTCACACATGCCCACCGTGCCCAG | (SEQ ID NO: 1) |
| CACCTGAATTCGAGGGTGCACCGTCAGTCTTCCTCTTCCCCCCAAAACCCAAGGA | |
| CACCCTCATGATCTCCCGGACTCCTGAGGTCACATGCGTGGTGGTGGACGTAAGC | |
| CACGAAGACCCTGAGGTCAAGTTCAACTGGTACGTGGACGGCGTGGAGGTGCAT | |
| AATGCCAAGACAAAGCCGCGGGAGGAGCAGTACAACAGCACGTACCGTGTGGTC | |
| AGCGTCCTCACCGTCCTGCACCAGGACTGGCTGAATGGCAAGGAGTACAAGTGC | |
| AAGGTCTCCAACAAAGCCCTCCCAACCCCCATCGAGAAAACCATCTCCAAAGCC | |
| AAAGGGCAGCCCCGAGAACCACAGGTGTACACCCTGCCCCCATCCCGGGATGAG | |
| CTGACCAAGAACCAGGTCAGCCTGACCTGCCTGGTCAAAGGCTTCTATCCAAGC | |
| GACATCGCCGTGGAGTGGGAGAGCAATGGGCAGCCGGAGAACAACTACAAGAC | |
| CACGCCTCCCGTGCTGGACTCCGACGGCTCCTTCTTCCTCTACAGCAAGCTCACC | |
| GTGGACAAGAGCAGGTGGCAGCAGGGGAACGTCTTCTCATGCTCCGTGATGCAT | |
| GAGGCTCTGCACAACCACTACACGCAGAAGAGCCTCTCCCTGTCTCCGGGTAAAT | |
| GAGTGCGACGGCCGCGACTCTAGAGGAT | |

### Example 10

### Production of an Antibody from a Polypeptide

### Hybridoma Technology

[0919] The antibodies of the present invention can be prepared by a variety of methods. (See, Current Protocols, Chapter 2.) As one example of such methods, cells expressing polypeptide of the present invention are administered to an animal to induce the production of sera containing polyclonal antibodies. In a preferred method, a preparation of polypeptide of the present invention is prepared and purified to render it substantially free of natural contaminants. Such a preparation is then introduced into an animal in order to produce polyclonal antisera of greater specific activity.

[0920] Monoclonal antibodies specific for polypeptide of the present invention are prepared using hybridoma technology (Kohler et al., Nature 256:495 (1975); Kohler et al., Eur. J. Immunol. 6:511 (1976); Kohler et al., Eur. J. Immunol. 6:292 (1976); Hammerling et al., in: Monoclonal Antibodies and T-Cell Hybridomas, Elsevier, N.Y., pp. 563-681 (1981)). In general, an animal (preferably a mouse) is immunized with polypeptide of the present invention or, more preferably, with a secreted polypeptide of the present invention-expressing cell. Such polypeptide-expressing cells are cultured in any suitable tissue culture medium, preferably in Earle's modified Eagle's medium supplemented with 10% fetal bovine serum (inactivated at about 56° C.), and supplemented with about 10 g/l of nonessential amino acids, about 1,000 U/ml of penicillin, and about 100 μg/ml of streptomycin.

[0921] The splenocytes of such mice are extracted and fused with a suitable myeloma cell line. Any suitable myeloma cell line may be employed in accordance with the present invention; however, it is preferable to employ the parent myeloma cell line (SP20), available from the ATCC. After fusion, the resulting hybridoma cells are selectively maintained in HAT medium, and then cloned by limiting dilution as described by Wands et al. (Gastroenterology 80:225-232 (1981)). The hybridoma cells obtained through such a selection are then assayed to identify clones which secrete antibodies capable of binding the polypeptide of the present invention.

[0922] Alternatively, additional antibodies capable of binding to polypeptide of the present invention can be produced in a two-step procedure using anti-idiotypic antibodies. Such a method makes use of the fact that antibodies are themselves antigens, and therefore, it is possible to obtain an antibody which binds to a second antibody. In accordance with this method, protein specific antibodies are used to immunize an animal, preferably a mouse. The splenocytes of such an animal are then used to produce hybridoma cells, and the hybridoma cells are screened to identify clones which produce an antibody whose ability to bind to the polypeptide of the present invention-specific antibody can be blocked by polypeptide of the present invention. Such antibodies comprise anti-idiotypic antibodies to the polypeptide of the present invention-specific antibody and are used to immunize an animal to induce formation of further polypeptide of the present invention-specific antibodies.

[0923] For in vivo use of antibodies in humans, an antibody is “humanized”. Such antibodies can be produced using genetic constructs derived from hybridoma cells producing the monoclonal antibodies described above. Methods for producing chimeric and humanized antibodies are known in the art and are discussed herein. (See, for review, Morrison, Science 229:1202 (1985); Oi et al., BioTechniques 4:214 (1986); Cabilly et al., U.S. Pat. No. 4,816,567; Taniguchi et al., EP 171496; Morrison et al., EP 173494; Neuberger et al., WO 8601533; Robinson et al., International Publication No. WO 8702671; Boulianne et al., Nature 312:643 (1984); Neuberger et al., Nature 314:268 (1985).)

### Isolation Of Antibody Fragments Directed Against Polypeptide of the Present Invention From a Library of scFvs

[0924] Naturally occurring V-genes isolated from human PBLs are constructed into a library of antibody fragments which contain reactivities against polypeptide of the present invention to which the donor may or may not have been exposed (see e.g., U.S. Pat. 5,885,793 incorporated herein by reference in its entirety).

[0925] Rescue of the Library

[0926] A library of scFvs is constructed from the RNA of human PBLs as described in International Publication No. WO 92/01047. To rescue phage displaying antibody fragments, approximately 10⁹ E. coli harboring the phagemid are used to inoculate 50 ml of 2×TY containing 1% glucose and 100 μg/ml of ampicillin (2×TY-AMP-GLU) and grown to an O.D. of 0.8 with shaking. Five ml of this culture is used to inoculate 50 ml of 2×TY-AMP-GLU, 2×108 TU of delta gene 3 helper (M13 delta gene III, see International Publication No. WO 92/01047) are added and the culture incubated at 37° C. for 45 minutes without shaking and then at 37° C. for 45 minutes with shaking. The culture is centrifuged at 4000 r.p.m. for 10 min. and the pellet resuspended in 2 liters of 2×TY containing 100 μg/ml ampicillin and 50 ug/ml kanamycin and grown overnight. Phage are prepared as described in International Application No. WO 92/01047.

[0927] M13 delta gene III is prepared as follows: M13 delta gene III helper phage does not encode gene III protein, hence the phage(mid) displaying antibody fragments have a greater avidity of binding to antigen. Infectious M13 delta gene III particles are made by growing the helper phage in cells harboring a pUC 19 derivative supplying the wild type gene III protein during phage morphogenesis. The culture is incubated for 1 hour at 37° C. without shaking and then for a further hour at 37° C. with shaking. Cells are spun down (IEC-Centra 8,400 r.p.m. for 10 min), resuspended in 300 ml 2×TY broth containing 100 μg ampicillin/ml and 25 μg kanamycin/ml (2×TY-AMP-KAN) and grown overnight, shaking at 37° C. Phage particles are purified and concentrated from the culture medium by two PEG-precipitations (Sambrook et al., 1990), resuspended in 2 ml PBS and passed through a 0.45 μm filter (Minisart NML; Sartorius) to give a final concentration of approximately 10¹³ transducing units/ml (ampicillin-resistant clones).

[0928] Panning of the Library

[0929] Immunotubes (Nunc) are coated overnight in PBS with 4 ml of either 100 μg/ml or 10 μg/ml of a polypeptide of the present invention. Tubes are blocked with 2% Marvel-PBS for 2 hours at 37° C. and then washed 3 times in PBS. Approximately 10¹³ TU of phage is applied to the tube and incubated for 30 minutes at room temperature tumbling on an over and under turntable and then left to stand for another 1.5 hours. Tubes are washed 10 times with PBS 0.1% Tween-20 and 10 times with PBS. Phage are eluted by adding 1 ml of 100 mM triethylamine and rotating 15 minutes on an under and over turntable after which the solution is immediately neutralized with 0.5 ml of 1.0M Tris-HCl, pH 7.4. Phage are then used to infect 10 ml of mid-log E. coli TG1 by incubating eluted phage with bacteria for 30 minutes at 37° C. The E. coli are then plated on TYE plates containing 1% glucose and 100 μg/ml ampicillin. The resulting bacterial library is then rescued with delta gene 3 helper phage as described above to prepare phage for a subsequent round of selection. This process is then repeated for a total of 4 rounds of affinity purification with tube-washing increased to 20 times with PBS, 0.1% Tween-20 and 20 times with PBS for rounds 3 and 4.

[0930] Characterization of Binders

[0931] Eluted phage from the 3rd and 4th rounds of selection are used to infect E. coli HB 2151 and soluble scFv is produced (Marks, et al., 1991) from single colonies for assay. ELISAs are performed with microtitre plates coated with 10 pg/ml of the polypeptide of the present invention in 50 mM bicarbonate pH 9.6. Clones positive in ELISA are further characterized by PCR fingerprinting (see, e.g., International Application No. WO 92/01047) and then by sequencing. These ELISA positive clones may also be further characterized by techniques known in the art, such as, for example, epitope mapping, binding affinity, receptor signal transduction, ability to block or competitively inhibit antibody/antigen binding, and competitive agonistic or antagonistic activity.

### Example 11

### Method of Determining Alterations in a Gene Corresponding to a Polynucleotide

[0932] RNA isolated from entire families or individual patients presenting with a phenotype of interest (such as a disease) is isolated. cDNA is then generated from these RNA samples using protocols known in the art. (See, Sambrook.) The cDNA is then used as a template for PCR, employing primers surrounding regions of interest in SEQ ID NO:X; and/or the nucleotide sequence of the cDNA contained in Clone ID NO:Z. Suggested PCR conditions consist of 35 cycles at 95 degrees C. for 30 seconds; 60-120 seconds at 52-58 degrees C.; and 60-120 seconds at 70 degrees C., using buffer solutions described in Sidransky et al., Science 252:706 (1991).

[0933] PCR products are then sequenced using primers labeled at their 5′ end with T4 polynucleotide kinase, employing SequiTherm Polymerase (Epicentre Technologies). The intron-exon boundaries of selected exons is also determined and genomic PCR products analyzed to confirm the results. PCR products harboring suspected mutations are then cloned and sequenced to validate the results of the direct sequencing.

[0934] PCR products are cloned into T-tailed vectors as described in Holton et al., Nucleic Acids Research, 19:1156 (1991) and sequenced with T7 polymerase (United States Biochemical). Affected individuals are identified by mutations not present in unaffected individuals.

[0935] Genomic rearrangements are also observed as a method of determining alterations in a gene corresponding to a polynucleotide. Genomic clones isolated according to Example 2 are nick-translated with digoxigenindeoxy-uridine 5′-triphosphate (Boehringer Manheim), and FISH performed as described in Johnson et al., Methods Cell Biol. 35:73-99 (1991). Hybridization with the labeled probe is carried out using a vast excess of human cot-1 DNA for specific hybridization to the corresponding genomic locus.

[0936] Chromosomes are counterstained with 4,6-diamino-2-phenylidole and propidium iodide, producing a combination of C- and R-bands. Aligned images for precise mapping are obtained using a triple-band filter set (Chroma Technology, Brattleboro, VT) in combination with a cooled charge-coupled device camera (Photometrics, Tucson, Ariz.) and variable excitation wavelength filters. (Johnson et al., Genet. Anal. Tech. Appl., 8:75 (1991).) Image collection, analysis and chromosomal fractional length measurements are performed using the ISee Graphical Program System. (Inovision Corporation, Durham, N.C.) Chromosome alterations of the genomic region hybridized by the probe are identified as insertions, deletions, and translocations. These alterations are used as a diagnostic marker for an associated disease.

### Example 12

### Method of Detecting Abnormal Levels of a Polypeptide in a Biological Sample

[0937] A polypeptide of the present invention can be detected in a biological sample, and if an increased or decreased level of the polypeptide is detected, this polypeptide is a marker for a particular phenotype. Methods of detection are numerous, and thus, it is understood that one skilled in the art can modify the following assay to fit their particular needs.

[0938] For example, antibody-sandwich ELISAs are used to detect polypeptides in a sample, preferably a biological sample. Wells of a microtiter plate are coated with specific antibodies, at a final concentration of 0.2 to 10 ug/ml. The antibodies are either monoclonal or polyclonal and are produced by the method described in Example 10. The wells are blocked so that non-specific binding of the polypeptide to the well is reduced.

[0939] The coated wells are then incubated for >2 hours at RT with a sample containing the polypeptide. Preferably, serial dilutions of the sample should be used to validate results. The plates are then washed three times with deionized or distilled water to remove unbound polypeptide.

[0940] Next, 50 ul of specific antibody-alkaline phosphatase conjugate, at a concentration of 25-400 ng, is added and incubated for 2 hours at room temperature. The plates are again washed three times with deionized or distilled water to remove unbound conjugate.

[0941] Add 75 ul of 4-methylumbelliferyl phosphate (MUP) or p-nitrophenyl phosphate (NPP) substrate solution to each well and incubate 1 hour at room temperature. Measure the reaction by a microtiter plate reader. Prepare a standard curve, using serial dilutions of a control sample, and plot polypeptide concentration on the X-axis (log scale) and fluorescence or absorbance of the Y-axis (linear scale). Interpolate the concentration of the polypeptide in the sample using the standard curve.

### Example 13

### Formulation

[0942] The invention also provides methods of treatment and/or prevention of diseases or disorders (such as, for example, any one or more of the diseases or disorders disclosed herein) by administration to a subject of an effective amount of a Therapeutic. By therapeutic is meant polynucleotides or polypeptides of the invention (including fragments and variants), agonists or antagonists thereof, and/or antibodies thereto, in combination with a pharmaceutically acceptable carrier type (e.g., a sterile carrier).

[0943] The Therapeutic will be formulated and dosed in a fashion consistent with good medical practice, taking into account the clinical condition of the individual patient (especially the side effects of treatment with the Therapeutic alone), the site of delivery, the method of administration, the scheduling of administration, and other factors known to practitioners. The “effective amount” for purposes herein is thus determined by such considerations.

[0944] As a general proposition, the total pharmaceutically effective amount of the Therapeutic administered parenterally per dose will be in the range of about 1 ug/kg/day to 10 mg/kg/day of patient body weight, although, as noted above, this will be subject to therapeutic discretion. More preferably, this dose is at least 0.01 mg/kg/day, and most preferably for humans between about 0.01 and 1 mg/kg/day for the hormone. If given continuously, the Therapeutic is typically administered at a dose rate of about 1 ug/kg/hour to about 50 ug/kg/hour, either by 1-4 injections per day or by continuous subcutaneous infusions, for example, using a mini-pump. An intravenous bag solution may also be employed. The length of treatment needed to observe changes and the interval following treatment for responses to occur appears to vary depending on the desired effect.

[0945] Therapeutics can be are administered orally, rectally, parenterally, intracistemally, intravaginally, intraperitoneally, topically (as by powders, ointments, gels, drops or transdermal patch), bucally, or as an oral or nasal spray. “Pharmaceutically acceptable carrier” refers to a non-toxic solid, semisolid or liquid filler, diluent, encapsulating material or formulation auxiliary of any. The term “parenteral” as used herein refers to modes of administration which include intravenous, intramuscular, intraperitoneal, intrasternal, subcutaneous and intraarticular injection and infusion.

[0946] Therapeutics of the invention are also suitably administered by sustained-release systems. Suitable examples of sustained-release Therapeutics are administered orally, rectally, parenterally, intracistemally, intravaginally, intraperitoneally, topically (as by powders, ointments, gels, drops or transdermal patch), bucally, or as an oral or nasal spray. “Pharmaceutically acceptable carrier” refers to a non-toxic solid, semisolid or liquid filler, diluent, encapsulating material or formulation auxiliary of any type. The term “parenteral” as used herein refers to modes of administration which include intravenous, intramuscular, intraperitoneal, intrastemal, subcutaneous and intraarticular injection and infusion.

[0947] Therapeutics of the invention are also suitably administered by sustained-release systems. Suitable examples of sustained-release Therapeutics include suitable polymeric materials (such as, for example, semi-permeable polymer matrices in the form of shaped articles, e.g., films, or mirocapsules), suitable hydrophobic materials (for example as an emulsion in an acceptable oil) or ion exchange resins, and sparingly soluble derivatives (such as, for example, a sparingly soluble salt).

[0948] Sustained-release matrices include polylactides (U.S. Pat. No. 3,773,919, EP 58,481), copolymers of L-glutamic acid and gamma-ethyl-L-glutamate (Sidman et al., Biopolymers 22:547-556 (1983)), poly (2- hydroxyethyl methacrylate) (Langer et al., J. Biomed. Mater. Res. 15:167-277 (1981), and Langer, Chem. Tech. 12:98-105 (1982)), ethylene vinyl acetate (Langer et al., Id.) or poly-D-(−)-3-hydroxybutyric acid (EP 133,988).

[0949] Sustained-release Therapeutics also include liposomally entrapped Therapeutics of the invention (see generally, Langer, Science 249:1527-1533 (1990); Treat et al., in Liposomes in the Therapy of Infectious Disease and Cancer, Lopez-Berestein and Fidler (eds.), Liss, New York, pp. 317 -327 and 353-365 (1989)). Liposomes containing the Therapeutic are prepared by methods known per se: DE 3,218,121; Epstein et al., Proc. Natl. Acad. Sci. (USA) 82:3688-3692 (1985); Hwang et al., Proc. Natl. Acad. Sci.(USA) 77:4030-4034 (1980); EP 52,322; EP 36,676; EP 88,046; EP 143,949; EP 142,641; Japanese Pat. Appl. 83-118008; U.S. Pat. Nos. 4,485,045 and 4,544,545; and EP 102,324. Ordinarily, the liposomes are of the small (about 200-800 Angstroms) unilamellar type in which the lipid content is greater than about 30 mol. percent cholesterol, the selected proportion being adjusted for the optimal Therapeutic.

[0950] In yet an additional embodiment, the Therapeutics of the invention are delivered by way of a pump (see Langer, supra; Sefton, CRC Crit. Ref. Biomed. Eng. 14:201 (1987); Buchwald et al., Surgery 88:507 (1980); Saudek et al., N. Engl. J. Med. 321:574 (1989)).

[0951] Other controlled release systems are discussed in the review by Langer (Science 249:1527-1533 (1990)).

[0952] For parenteral administration, in one embodiment, the Therapeutic is formulated generally by mixing it at the desired degree of purity, in a unit dosage injectable form (solution, suspension, or emulsion), with a pharmaceutically acceptable carrier, i.e., one that is non-toxic to recipients at the dosages and concentrations employed and is compatible with other ingredients of the formulation. For example, the formulation preferably does not include oxidizing agents and other compounds that are known to be deleterious to the Therapeutic.

[0953] Generally, the formulations are prepared by contacting the Therapeutic uniformly and intimately with liquid carriers or finely divided solid carriers or both. Then, if necessary, the product is shaped into the desired formulation. Preferably the carrier is a parenteral carrier, more preferably a solution that is isotonic with the blood of the recipient. Examples of such carrier vehicles include water, saline, Ringer's solution, and dextrose solution. Non-aqueous vehicles such as fixed oils and ethyl oleate are also useful herein, as well as liposomes.

[0954] The carrier suitably contains minor amounts of additives such as substances that enhance isotonicity and chemical stability. Such materials are non-toxic to recipients at the dosages and concentrations employed, and include buffers such as phosphate, citrate, succinate, acetic acid, and other organic acids or their salts; antioxidants such as ascorbic acid; low molecular weight (less than about ten residues) polypeptides, e.g., polyarginine or tripeptides; proteins, such as serum albumin, gelatin, or immunoglobulins; hydrophilic polymers such as polyvinylpyrrolidone; amino acids, such as glycine, glutamic acid, aspartic acid, or arginine; monosaccharides, disaccharides, and other carbohydrates including cellulose or its derivatives, glucose, manose, or dextrins; chelating agents such as EDTA; sugar alcohols such as mannitol or sorbitol; counterions such as sodium; and/or nonionic surfactants such as polysorbates, poloxamers, or PEG.

[0955] The Therapeutic is typically formulated in such vehicles at a concentration of about 0.1 mg/ml to 100 mg/ml, preferably 1 -10 mg/ml, at a pH of about 3 to 8. It will be understood that the use of certain of the foregoing excipients, carriers, or stabilizers will result in the formation of polypeptide salts.

[0956] Any pharmaceutical used for therapeutic administration can be sterile. Sterility is readily accomplished by filtration through sterile filtration membranes (e.g., 0.2 micron membranes). Therapeutics generally are placed into a container having a sterile access port, for example, an intravenous solution bag or vial having a stopper pierceable by a hypodermic injection needle.

[0957] Therapeutics ordinarily will be stored in unit or multi-dose containers, for example, sealed ampoules or vials, as an aqueous solution or as a lyophilized formulation for reconstitution. As an example of a lyophilized formulation, 10-ml vials are filled with 5 ml of sterile-filtered 1% (w/v) aqueous Therapeutic solution, and the resulting mixture is lyophilized. The infusion solution is prepared by reconstituting the lyophilized Therapeutic using bacteriostatic Water-for-injection.

[0958] The invention also provides a pharmaceutical pack or kit comprising one or more containers filled with one or more of the ingredients of the Therapeutics of the invention. Associated with such container(s) can be a notice in the form prescribed by a governmental agency regulating the manufacture, use or sale of pharmaceuticals or biological products, which notice reflects approval by the agency of manufacture, use or sale for human administration. In addition, the Therapeutics may be employed in conjunction with other therapeutic compounds.

[0959] The Therapeutics of the invention may be administered alone or in combination with adjuvants. Adjuvants that may be administered with the Therapeutics of the invention include, but are not limited to, alum, alum plus deoxycholate (ImmunoAg), MTP-PE (Biocine Corp.), QS21 (Genentech, Inc.), BCG (e.g., THERACYS®, MPL and nonviable prepartions of Corynebacterium parvum. In a specific embodiment, Therapeutics of the invention are administered in combination with alum. In another specific embodiment, Therapeutics of the invention are administered in combination with QS-21. Further adjuvants that may be administered with the Therapeutics of the invention include, but are not limited to, Monophosphoryl lipid immunomodulator, AdjuVax 100a, QS-21, QS-18, CRL1005, Aluminum salts, MF-59, and Virosomal adjuvant technology. Vaccines that may be administered with the Therapeutics of the invention include, but are not limited to, vaccines directed toward protection against MMR (measles, mumps, rubella), polio, varicella, tetanus/diptheria, hepatitis A, hepatitis B, haemophilus influenzae B, whooping cough, pneumonia, influenza, Lyme's Disease, rotavirus, cholera, yellow fever, Japanese encephalitis, poliomyelitis, rabies, typhoid fever, and pertussis. Combinations may be administered either concomitantly, e.g., as an admixture, separately but simultaneously or concurrently; or sequentially. This includes presentations in which the combined agents are administered together as a therapeutic mixture, and also procedures in which the combined agents are administered separately but simultaneously, e.g., as through separate intravenous lines into the same individual. Administration “in combination” further includes the separate administration of one of the compounds or agents given first, followed by the second.

[0960] The Therapeutics of the invention may be administered alone or in combination with other therapeutic agents. Therapeutic agents that may be administered in combination with the Therapeutics of the invention, include but not limited to, chemotherapeutic agents, antibiotics, steroidal and non-steroidal anti-inflammatories, conventional immunotherapeutic agents, and/or therapeutic treatments described below. Combinations may be administered either concomitantly, e.g., as an admixture, separately but simultaneously or concurrently; or sequentially. This includes presentations in which the combined agents are administered together as a therapeutic mixture, and also procedures in which the combined agents are administered separately but simultaneously, e.g., as through separate intravenous lines into the same individual. Administration “in combination” further includes the separate administration of one of the compounds or agents given first, followed by the second.

[0961] In certain embodiments, Therapeutics of the invention are administered in combination with antiretroviral agents, nucleoside/nucleotide reverse transcriptase inhibitors (NRTIs), non-nucleoside reverse transcriptase inhibitors (NNRTIs), and/or protease inhibitors (PIs). NRTIs that may be administered in combination with the Therapeutics of the invention, include, but are not limited to, RETROVIR™ (zidovudine/AZT), VIDEX™ (didanosine/ddI), HIVID™ (zalcitabine/ddC), ZERIT™ (stavudine/d4T), EPIVIR™ (lamivudine/3TC), and COMBIVIR™ (zidovudine/lamivudine). NNRTIs that may be administered in combination with the Therapeutics of the invention, include, but are not limited to, VIRAMUNE™ (nevirapine), RESCRIPTOR™ (delavirdine), and SUSTIVA™ (efavirenz). Protease inhibitors that may be administered in combination with the Therapeutics of the invention, include, but are not limited to, CRIXIVAN™ (indinavir), NORVIR™ (ritonavir), INVIRASE™ (saquinavir), and VIRACEPT™ (nelfinavir). In a specific embodiment, antiretroviral agents, nucleoside reverse transcriptase inhibitors, non-nucleoside reverse transcriptase inhibitors, and/or protease inhibitors may be used in any combination with Therapeutics of the invention to treat AIDS and/or to prevent or treat HIV infection.

[0962] Additional NRTIs include LODENOSINE™ (F-ddA; an acid-stable adenosine NRTI; Triangle/Abbott; COVIRACIL™ (emtricitabine/FTC; structurally related to lamivudine (3TC) but with 3- to 10-fold greater activity in vitro; Triangle/Abbott); dOTC (BCH-10652, also structurally related to lamivudine but retains activity against a substantial proportion of lamivudine-resistant isolates; Biochem Pharma); Adefovir (refused approval for anti-HIV therapy by FDA; Gilead Sciences); PREVEON™ (Adefovir Dipivoxil, the active prodrug of adefovir; its active form is PMEA-pp); TENOFOVIR™ (bis-POC PMPA, a PMPA prodrug; Gilead); DAPD/DXG (active metabolite of DAPD; Triangle/Abbott); D-D4FC (related to 3TC, with activity against AZT/3TC-resistant virus); GW420867X (Glaxo Wellcome); ZIAGEN™ (abacavir/159U89; Glaxo Wellcome Inc.); CS-87 (3′ azido-2′,3′-dideoxyuridine; WO 99/66936); and S-acyl-2-thioethyl (SATE)-bearing prodrug forms of -β-FD4C and β-L-FddC (WO 98/17281).

[0963] Additional NNRTIs include COACTINON™ (Emivirine/MKC-442, potent NNRTI of the HEPT class; Triangle/Abbott); CAPRAVIRINE™ (AG-1549/S-1153, a next generation NNRTI with activity against viruses containing the K103N mutation; Agouron); PNU-142721 (has 20- to 50-fold greater activity than its predecessor delavirdine and is active against K103N mutants; Pharmacia & Upjohn); DPC-961 and DPC-963 (second-generation derivatives of efavirenz, designed to be active against viruses with the K103N mutation; DuPont); GW-420867X (has 25-fold greater activity than HBY097 and is active against K103N mutants; Glaxo Wellcome); CALANOLIDE A (naturally occurring agent from the latex tree; active against viruses containing either or both the Y181C and K103N mutations); and Propolis (WO 99/49830).

[0964] Additional protease inhibitors include LOPINAVIR™ (ABT378/r; Abbott Laboratories); BMS-232632 (an azapeptide; Bristol-Myres Squibb); TIPRANAVIR™ (PNU-140690, a non-peptic dihydropyrone; Pharmacia & Upjohn); PD-178390 (a nonpeptidic dihydropyrone; Parke-Davis); BMS 232632 (an azapeptide; Bristol-Myers Squibb); L-756,423 (an indinavir analog; Merck); DMP-450 (a cyclic urea compound; Avid & DuPont); AG-1776 (a peptidomimetic with in vitro activity against protease inhibitor-resistant viruses; Agouron); VX-175/GW-433908 (phosphate prodrug of amprenavir; Vertex & Glaxo Welcome); CGP61755 (Ciba); and AGENERASE™ (amprenavir; Glaxo Wellcome Inc.).

[0965] Additional antiretroviral agents include fusion inhibitors/gp41 binders. Fusion inhibitors/gp41 binders include T-20 (a peptide from residues 643-678 of the HIV gp41 transmembrane protein ectodomain which binds to gp41 in its resting state and prevents transformation to the fusogenic state; Trimeris) and T-1249 (a second-generation fusion inhibitor; Trimeris).

[0966] Additional antiretroviral agents include fusion inhibitors/chemokine receptor antagonists. Fusion inhibitors/chemokine receptor antagonists include CXCR4 antagonists such as AMD 3100 (a bicyclam), SDF-1 and its analogs, and ALX40-4C (a cationic peptide), T22 (an 18 amino acid peptide; Trimeris) and the T22 analogs T134 and T140; CCR5 antagonists such as RANTES (9-68), AOP-RANTES, NNY-RANTES, and TAK-779; and CCR5/CXCR4 antagonists such as NSC 651016 (a distamycin analog). Also included are CCR2B, CCR3, and CCR6 antagonists. Chemokine recpetor agonists such as RANTES, SDF-1, MIP-1α, MIP-1β, etc., may also inhibit fusion.

[0967] Additional antiretroviral agents include integrase inhibitors. Integrase inhibitors include dicaffeoylquinic (DFQA) acids; L-chicoric acid (a dicaffeoyltartaric (DCTA) acid); quinalizarin (QLC) and related anthraquinones; ZINTEVIR™ (AR 177, an oligonucleotide that probably acts at cell surface rather than being a true integrase inhibitor; Arondex); and naphthols such as those disclosed in WO 98/50347.

[0968] Additional antiretroviral agents include hydroxyurea-like compounds such as BCX-34 (a purine nucleoside phosphorylase inhibitor; Biocryst); ribonucleotide reductase inhibitors such as DIDOX™ (Molecules for Health); inosine monophosphate dehydrogenase (IMPDH) inhibitors sucha as VX-497 (Vertex); and myvopholic acids such as CellCept (mycophenolate mofetil; Roche).

[0969] Additional antiretroviral agents include inhibitors of viral integrase, inhibitors of viral genome nuclear translocation such as arylene bis(methylketone) compounds; inhibitors of HIV entry such as AOP-RANTES, NNY-RANTES, RANTES-IgG fusion protein, soluble complexes of RANTES and glycosaminoglycans (GAG), and AMD-3100; nucleocapsid zinc finger inhibitors such as dithiane compounds; targets of HIV Tat and Rev; and pharmacoenhancers such as ABT-378.

[0970] Other antiretroviral therapies and adjunct therapies include cytokines and lymphokines such as MIP-1α, MIP-1β, SDF-1α, IL-2, PROLEUKIN™ (aldesleukin/L2-7001; Chiron), IL-4, IL-10, IL-12, and IL-1 3; interferons such as IFN-α2a; antagonists of TNFs, NFκB, GM-CSF, M-CSF, and IL-10; agents that modulate immune activation such as cyclosporin and prednisone; vaccines such as Remune™ (HIV Immunogen), APL 400-003 (Apollon), recombinant gp120 and fragments, bivalent (B/E) recombinant envelope glycoprotein, rgp120CM235, MN rgp120, SF-2 rgp120, gp120/soluble CD4 complex, Delta JR-FL protein, branched synthetic peptide derived from discontinuous gp120 C3/C4 domain, fusion-competent immunogens, and Gag, Pol, Nef, and Tat vaccines; gene-based therapies such as genetic suppressor elements (GSEs; WO 98/54366), and intrakines (genetically modified CC chemokines targetted to the ER to block surface expression of newly synthesized CCR5 (Yang et al., PNAS 94:11567-72 (1997); Chen et al., Nat. Med. 3:1110-16 (1997)); antibodies such as the anti-CXCR4 antibody 12G5, the anti-CCR5 antibodies 2D7, 5C7, PA8, PA9, PA10, PA11, PA12, and PA14, the anti-CD4 antibodies Q4120 and RPA-T4, the anti-CCR3 antibody 7B11, the anti-gp120 antibodies 17b, 48d, 447-52D, 257-D, 268-D and 50.1, anti-Tat antibodies, anti-TNF-α antibodies, and monoclonal antibody 33A; aryl hydrocarbon (AH) receptor agonists and antagonists such as TCDD, 3,3′,4,4′,5-pentachlorobiphenyl, 3,3′,4,4′-tetrachlorobiphenyl, and α-naphthoflavone (WO 98/30213); and antioxidants such as γ-L-glutamyl-L-cysteine ethyl ester (γ-GCE; WO 99/56764).

[0971] In a further embodiment, the Therapeutics of the invention are administered in combination with an antiviral agent. Antiviral agents that may be administered with the Therapeutics of the invention include, but are not limited to, acyclovir, ribavirin, amantadine, and remantidine.

[0972] In other embodiments, Therapeutics of the invention may be administered in combination with anti-opportunistic infection agents. Anti-opportunistic agents that may be administered in combination with the Therapeutics of the invention, include, but are not limited to, TRIMETHOPRIM-SULFAMETHOXAZOLE™, DAPSONE™, PENTAMIDINE™, ATOVAQUONE™, ISONIAZID™, RIFAMPIN™, PYRAZINAMIDE™, ETHAMBUTOL™, RIFABUTIN™, CLARITHROMYCIN™, AZITHROMYCIN™, GANCICLOVIR™, FOSCARNET™, CIDOFOVIR™, FLUCONAZOLE™, ITRACONAZOLE™, KETOCONAZOLE™, ACYCLOVIR™, FAMCICOLVIR™, PYRIMETHAMINE™, LEUCOVORIN™, NEUPOGEN™ (filgrastim/G-CSF), and LEUKINE™ (sargramostim/GM-CSF). In a specific embodiment, Therapeutics of the invention are used in any combination with TRIMETHOPRIM-SULFAMETHOXAZOLE™, DAPSONE™, PENTAMIDINE™, and/or ATOVAQUONE™ to prophylactically treat or prevent an opportunistic Pneumocystis carinii pneumonia infection. In another specific embodiment, Therapeutics of the invention are used in any combination with ISONIAZID™, RIFAMPIN™, PYRAZINAMIDE™, and/or ETHAMBUTOL™ to prophylactically treat or prevent an opportunistic Mycobacterium avium complex infection. In another specific embodiment, Therapeutics of the invention are used in any combination with RIFABUTIN™, CLARITHROMYCIN™, and/or AZITHROMYCIN™ to prophylactically treat or prevent an opportunistic Mycobacterium tuberculosis infection. In another specific embodiment, Therapeutics of the invention are used in any combination with GANCICLOVIR™, FOSCARNET™, and/or CIDOFOVIR™ to prophylactically treat or prevent an opportunistic cytomegalovirus infection. In another specific embodiment, Therapeutics of the invention are used in any combination with FLUCONAZOLE™, ITRACONAZOLE™, and/or KETOCONAZOLE™ to prophylactically treat or prevent an opportunistic fungal infection. In another specific embodiment, Therapeutics of the invention are used in any combination with ACYCLOVIR™ and/or FAMCICOLVIR™ to prophylactically treat or prevent an opportunistic herpes simplex virus type I and/or type II infection. In another specific embodiment, Therapeutics of the invention are used in any combination with PYRIMETHAMINE™ and/or LEUCOVORIN™ to prophylactically treat or prevent an opportunistic Toxoplasma gondii infection. In another specific embodiment, Therapeutics of the invention are used in any combination with LEUCOVORIN™ and/or NEUPOGEN™ to prophylactically treat or prevent an opportunistic bacterial infection.

[0973] In a further embodiment, the Therapeutics of the invention are administered in combination with an antibiotic agent. Antibiotic agents that may be administered with the Therapeutics of the invention include, but are not limited to, amoxicillin, beta-lactamases, aminoglycosides, beta-lactam (glycopeptide), beta-lactamases, Clindamycin, chloramphenicol, cephalosporins, ciprofloxacin, ciprofloxacin, erythromycin, fluoroquinolones, macrolides, metronidazole, penicillins, quinolones, rapamycin, rifampin, streptomycin, sulfonamide, tetracyclines, trimethoprim, trimethoprim-sulfamthoxazole, and vancomycin.

[0974] In other embodiments, Therapeutics of the invention are administered in combination with immunosuppressive agents. Immunosuppressive agents that may be administered in combination with the Therapeutics of the invention include, but are not limited to, steroids, cyclosporine, cyclosporine analogs, cyclophosphamide methylprednisone, prednisone, azathioprine, FK-506, 15-deoxyspergualin, and other immunosuppressive agents that act by suppressing the function of responding T cells. Other immunosuppressive agents that may be administered in combination with the Therapeutics of the invention include, but are not limited to, prednisolone, methotrexate, thalidomide, methoxsalen, rapamycin, leflunomide, mizoribine (BREDININ™), brequinar, deoxyspergualin, and azaspirane (SKF 105685), ORTHOCLONE OKT® 3 (muromonab-CD3), SANDIMMUNE™, NEORAL™, SANGDYA™ (cyclosporine), PROGRAF® (FK506, tacrolimus), CELLCEPT® (mycophenolate motefil, of which the active metabolite is mycophenolic acid), IMURAN™ (azathioprine), glucocorticosteroids, adrenocortical steroids such as DELTASONE™ (prednisone) and HYDELTRASOL™ (prednisolone), FOLEX™ and MEXATE™ (methotrxate), OXSORALEN-ULTRA™ (methoxsalen) and RAPAMUNE™ (sirolimus). In a specific embodiment, immunosuppressants may be used to prevent rejection of organ or bone marrow transplantation.

[0975] In an additional embodiment, Therapeutics of the invention are administered alone or in combination with one or more intravenous immune globulin preparations. Intravenous immune globulin preparations that may be administered with the Therapeutics of the invention include, but not limited to, GAMMAR™, IVEEGAM™, SANDOGLOBULIN™, GAMMAGARD S/D™, ATGAM™ (antithymocyte glubulin), and GAMIMUNE™. In a specific embodiment, Therapeutics of the invention are administered in combination with intravenous immune globulin preparations in transplantation therapy (e.g., bone marrow transplant).

[0976] In certain embodiments, the Therapeutics of the invention are administered alone or in combination with an anti-inflammatory agent. Anti-inflammatory agents that may be administered with the Therapeutics of the invention include, but are not limited to, corticosteroids (e.g. betamethasone, budesonide, cortisone, dexamethasone, hydrocortisone, methylprednisolone, prednisolone, prednisone, and triamcinolone), nonsteroidal anti-inflammatory drugs (e.g., diclofenac, diflunisal, etodolac, fenoprofen, floctafenine, flurbiprofen, ibuprofen, indomethacin, ketoprofen, meclofenamate, mefenamic acid, meloxicam, nabumetone, naproxen, oxaprozin, phenylbutazone, piroxicam, sulindac, tenoxicam, tiaprofenic acid, and tolmetin.), as well as antihistamines, aminoarylcarboxylic acid derivatives, arylacetic acid derivatives, arylbutyric acid derivatives, arylcarboxylic acids, arylpropionic acid derivatives, pyrazoles, pyrazolones, salicylic acid derivatives, thiazinecarboxamides, e-acetamidocaproic acid, S-adenosylmethionine, 3-amino-4-hydroxybutyric acid, amixetrine, bendazac, benzydamine, bucolome, difenpiramide, ditazol, emorfazone, guaiazulene, nabumetone, nimesulide, orgotein, oxaceprol, paranyline, perisoxal, pifoxime, proquazone, proxazole, and tenidap.

[0977] In an additional embodiment, the compositions of the invention are administered alone or in combination with an anti-angiogenic agent. Anti-angiogenic agents that may be administered with the compositions of the invention include, but are not limited to, Angiostatin (Entremed, Rockville, Md.), Troponin-1 (Boston Life Sciences, Boston, Mass.), anti-Invasive Factor, retinoic acid and derivatives thereof, paclitaxel (Taxol), Suramin, Tissue Inhibitor of Metalloproteinase-l, Tissue Inhibitor of Metalloproteinase-2, VEGI, Plasminogen Activator Inhibitor-1, Plasminogen Activator Inhibitor-2, and various forms of the lighter “d group” transition metals.

[0978] Lighter “d group” transition metals include, for example, vanadium, molybdenum, tungsten, titanium, niobium, and tantalum species. Such transition metal species may form transition metal complexes. Suitable complexes of the above-mentioned transition metal species include oxo transition metal complexes.

[0979] Representative examples of vanadium complexes include oxo vanadium complexes such as vanadate and vanadyl complexes. Suitable vanadate complexes include metavanadate and orthovanadate complexes such as, for example, ammonium metavanadate, sodium metavanadate, and sodium orthovanadate. Suitable vanadyl complexes include, for example, vanadyl acetylacetonate and vanadyl sulfate including vanadyl sulfate hydrates such as vanadyl sulfate mono- and trihydrates.

[0980] Representative examples of tungsten and molybdenum complexes also include oxo complexes. Suitable oxo tungsten complexes include tungstate and tungsten oxide complexes. Suitable tungstate complexes include ammonium tungstate, calcium tungstate, sodium tungstate dihydrate, and tungstic acid. Suitable tungsten oxides include tungsten (IV) oxide and tungsten (VI) oxide. Suitable oxo molybdenum complexes include molybdate, molybdenum oxide, and molybdenyl complexes. Suitable molybdate complexes include ammonium molybdate and its hydrates, sodium molybdate and its hydrates, and potassium molybdate and its hydrates. Suitable molybdenum oxides include molybdenum (VI) oxide, molybdenum (VI) oxide, and molybdic acid. Suitable molybdenyl complexes include, for example, molybdenyl acetylacetonate. Other suitable tungsten and molybdenum complexes include hydroxo derivatives derived from, for example, glycerol, tartaric acid, and sugars.

[0981] A wide variety of other anti-angiogenic factors may also be utilized within the context of the present invention. Representative examples include, but are not limited to, platelet factor 4; protamine sulphate; sulphated chitin derivatives (prepared from queen crab shells), (Murata et al., Cancer Res. 51:22-26, (1991)); Sulphated Polysaccharide Peptidoglycan Complex (SP-PG) (the function of this compound may be enhanced by the presence of steroids such as estrogen, and tamoxifen citrate); Staurosporine; modulators of matrix metabolism, including for example, proline analogs, cishydroxyproline, d,L-3,4-dehydroproline, Thiaproline, alpha,alpha-dipyridyl, aminopropionitrile fumarate; 4-propyl-5-(4-pyridinyl)-2(3H)-oxazolone; Methotrexate; Mitoxantrone; Heparin; Interferons; 2 Macroglobulin-serum; ChIMP-3 (Pavloff et al., J. Bio. Chem. 267:17321-17326, (1992)); Chymostatin (Tomkinson et al., Biochem J. 286:475-480, (1992)); Cyclodextrin Tetradecasulfate; Eponemycin; Camptothecin; Fumagillin (Ingber et al., Nature 348:555-557, (1990)); Gold Sodium Thiomalate (“GST”; Matsubara and Ziff, J. Clin. Invest. 79:1440-1446, (1987)); anticollagenase-serum; alpha2-antiplasmin (Holmes et al., J. Biol. Chem. 262(4):1659-1664, (1987)); Bisantrene (National Cancer Institute); Lobenzarit disodium (N-(2)-carboxyphenyl-4-chloroanthronilic acid disodium or “CCA”; (Takeuchi et al., Agents Actions 36:312-316, (1992)); and metalloproteinase inhibitors such as BB94.

[0982] Additional anti-angiogenic factors that may also be utilized within the context of the present invention include Thalidomide, (Celgene, Warren, N.J.); Angiostatic steroid; AGM-1470 (H. Brem and J. Folkman J Pediatr. Surg. 28:445-51 (1993)); an integrin alpha v beta 3 antagonist (C. Storgard et al., J Clin. Invest. 103:47-54 (1999)); carboxynaminolmidazole; Carboxyamidotriazole (CAI) (National Cancer Institute, Bethesda, Md.); Conbretastatin A-4 (CA4P) (OXiGENE, Boston, Mass.); Squalamine (Magainin Pharmaceuticals, Plymouth Meeting, Pa.); TNP-470, (Tap Pharmaceuticals, Deerfield, Ill.); ZD-0101 AstraZeneca (London, UK); APRA (CT2584); Benefin, Byrostatin-1 (SC339555); CGP-41251 (PKC 412); CM101, Dexrazoxane (ICRF187); DMXAA; Endostatin; Flavopridiol; Genestein; GTE; ImmTher; Iressa (ZD1839); Octreotide (Somatostatin); Panretin; Penacillamine; Photopoint; PI-88; Prinomastat (AG-3340) Purlytin; Suradista (FCE26644); Tamoxifen (Nolvadex); Tazarotene; Tetrathiomolybdate; Xeloda (Capecitabine); and 5-Fluorouracil.

[0983] Anti-angiogenic agents that may be administered in combination with the compounds of the invention may work through a variety of mechanisms including, but not limited to, inhibiting proteolysis of the extracellular matrix, blocking the function of endothelial cell-extracellular matrix adhesion molecules, by antagonizing the function of angiogenesis inducers such as growth factors, and inhibiting integrin receptors expressed on proliferating endothelial cells. Examples of anti-angiogenic inhibitors that interfere with extracellular matrix proteolysis and which may be administered in combination with the compositions of the invention include, but are not limited to, AG-3340 (Agouron, La Jolla, Calif.), BAY-12-9566 (Bayer, West Haven, Conn.), BMS-275291 (Bristol Myers Squibb, Princeton, N.J.), CGS-27032A (Novartis, East Hanover, N.J.), Marimastat (British Biotech, Oxford, UK), and Metastat (Aetema, St-Foy, Quebec). Examples of anti-angiogenic inhibitors that act by blocking the function of endothelial cell-extracellular matrix adhesion molecules and which may be administered in combination with the compositions of the invention include, but are not limited to, EMD-121974 (Merck KcgaA Darmstadt, Germany) and Vitaxin (Ixsys, La Jolla, Calif./Medimmune, Gaithersburg, Md.). Examples of anti-angiogenic agents that act by directly antagonizing or inhibiting angiogenesis inducers and which may be administered in combination with the compositions of the invention include, but are not limited to, Angiozyme (Ribozyme, Boulder, Colo.), Anti-VEGF antibody (Genentech, S. San Francisco, Calif), PTK-787/ZK-225846 (Novartis, Basel, Switzerland), SU-101 (Sugen, S. San Francisco, Calif.), SU-5416 (Sugen/Pharmacia Upjohn, Bridgewater, N.J.) and SU-6668 (Sugen). Other anti-angiogenic agents act to indirectly inhibit angiogenesis. Examples of indirect inhibitors of angiogenesis which may be administered in combination with the compositions of the invention include, but are not limited to, IM-862 (Cytran, Kirkland, Wash.), Interferon-alpha, IL-12 (Roche, Nutley, N.J.) and Pentosan polysulfate (Georgetown University, Washington, DC).

[0984] In particular embodiments, the use of compositions of the invention in combination with anti-angiogenic agents is contemplated for the treatment, prevention, and/or amelioration of an autoimmune disease, such as for example, an autoimmune disease described herein.

[0985] In a particular embodiment, the use of compositions of the invention in combination with anti-angiogenic agents is contemplated for the treatment, prevention, and/or amelioration of arthritis. In a more particular embodiment, the use of compositions of the invention in combination with anti-angiogenic agents is contemplated for the treatment, prevention, and/or amelioration of rheumatoid arthritis.

[0986] In another embodiment, the polynucleotides encoding a polypeptide of the present invention are administered in combination with an angiogenic protein, or polynucleotides encoding an angiogenic protein. Examples of angiogenic proteins that may be administered with the compositions of the invention include, but are not limited to, acidic and basic fibroblast growth factors, VEGF-1, VEGF-2, VEGF-3, epidermal growth factor alpha and beta, platelet-derived endothelial cell growth factor, platelet-derived growth factor, tumor necrosis factor alpha, hepatocyte growth factor, insulin-like growth factor, colony stimulating factor, macrophage colony stimulating factor, granulocyte/macrophage colony stimulating factor, and nitric oxide synthase.

[0987] In additional embodiments, compositions of the invention are administered in combination with a chemotherapeutic agent. Chemotherapeutic agents that may be administered with the Therapeutics of the invention include, but are not limited to alkylating agents such as nitrogen mustards (for example, Mechlorethamine, cyclophosphamide, Cyclophosphamide Ifosfamide, Melphalan (L-sarcolysin), and Chlorambucil), ethylenimines and methylmelamines (for example, Hexamethylmelamine and Thiotepa), alkyl sulfonates (for example, Busulfan), nitrosoureas (for example, Carmustine (BCNU), Lomustine (CCNU), Semustine (methyl-CCNU), and Streptozocin (streptozotocin)), triazenes (for example, Dacarbazine (DTIC; dimethyltriazenoimidazolecarboxamide)), folic acid analogs (for example, Methotrexate (amethopterin)), pyrimidine analogs (for example, Fluorouacil (5-fluorouracil; 5-FU), Floxuridine (fluorodeoxyuridine; FudR), and Cytarabine (cytosine arabinoside)), purine analogs and related inhibitors (for example, Mercaptopurine (6-mercaptopurine; 6-MP), Thioguanine (6-thioguanine; TG), and Pentostatin (2′-deoxycoformycin)), vinca alkaloids (for example, Vinblastine (VLB, vinblastine sulfate) and Vincristine (vincristine sulfate)), epipodophyllotoxins (for example, Etoposide and Teniposide), antibiotics (for example, Dactinomycin (actinomycin D), Daunorubicin (daunomycin; rubidomycin), Doxorubicin, Bleomycin, Plicamycin (mithramycin), and Mitomycin (mitomycin C), enzymes (for example, L-Asparaginase), biological response modifiers (for example, Interferon-alpha and interferon-alpha-2b), platinum coordination compounds (for example, Cisplatin (cis-DDP) and Carboplatin), anthracenedione (Mitoxantrone), substituted ureas (for example, Hydroxyurea), methylhydrazine derivatives (for example, Procarbazine (N-methylhydrazine; MIH), adrenocorticosteroids (for example, Prednisone), progestins (for example, Hydroxyprogesterone caproate, Medroxyprogesterone, Medroxyprogesterone acetate, and Megestrol acetate), estrogens (for example, Diethylstilbestrol (DES), Diethylstilbestrol diphosphate, Estradiol, and Ethinyl estradiol), antiestrogens (for example, Tamoxifen), androgens (Testosterone proprionate, and Fluoxymesterone), antiandrogens (for example, Flutamide), gonadotropin-releasing horomone analogs (for example, Leuprolide), other hormones and hormone analogs (for example, methyltestosterone, estramustine, estramustine phosphate sodium, chlorotrianisene, and testolactone), and others (for example, dicarbazine, glutamic acid, and mitotane).

[0988] In one embodiment, the compositions of the invention are administered in combination with one or more of the following drugs: infliximab (also known as Remicade™ Centocor, Inc.), Trocade (Roche, RO-32-3555), Leflunomide (also known as Arava™ from Hoechst Marion Roussel), Kineret™ (an IL-1 Receptor antagonist also known as Anakinra from Amgen, Inc.).

[0989] In a specific embodiment, compositions of the invention are administered in combination with CHOP (cyclophosphamide, doxorubicin, vincristine, and prednisone) or combination of one or more of the components of CHOP. In one embodiment, the compositions of the invention are administered in combination with anti-CD20 antibodies, human monoclonal anti-CD20 antibodies. In another embodiment, the compositions of the invention are administered in combination with anti-CD20 antibodies and CHOP, or anti-CD20 antibodies and any combination of one or more of the components of CHOP, particularly cyclophosphamide and/or prednisone. In a specific embodiment, compositions of the invention are administered in combination with Rituximab. In a further embodiment, compositions of the invention are administered with Rituximab and CHOP, or Rituximab and any combination of one or more of the components of CHOP, particularly cyclophosphamide and/or prednisone. In a specific embodiment, compositions of the invention are administered in combination with tositumomab. In a further embodiment, compositions of the invention are administered with tositumomab and CHOP, or tositumomab and any combination of one or more of the components of CHOP, particularly cyclophosphamide and/or prednisone. The anti-CD20 antibodies may optionally be associated with radioisotopes, toxins or cytotoxic prodrugs.

[0990] In another specific embodiment, the compositions of the invention are administered in combination Zevalin™. In a further embodiment, compositions of the invention are administered with Zevalin™ and CHOP, or Zevalin™ and any combination of one or more of the components of CHOP, particularly cyclophosphamide and/or prednisone. Zevalin™ may be associated with one or more radisotopes. Particularly preferred isotopes are ⁹⁰Y and ¹¹¹In.

[0991] In an additional embodiment, the Therapeutics of the invention are administered in combination with cytokines. Cytokines that may be administered with the Therapeutics of the invention include, but are not limited to, IL2, IL3, IL4, IL5, IL6, IL7, IL10, IL12, IL13, IL15, anti-CD40, CD40L, IFN-gamma and TNF-alpha. In another embodiment, Therapeutics of the invention may be administered with any interleukin, including, but not limited to, IL-1alpha, IL-1beta, IL-2, IL-3, IL-4, IL-5, IL-6, IL-7, IL-8, IL-9, IL-10, IL-11, IL-12, IL-13, IL-14, IL-15, IL-16, IL-17, IL-18, IL-19, IL-20, and IL-21.

[0992] In one embodiment, the Therapeutics of the invention are administered in combination with members of the TNF family. TNF, TNF-related or TNF-like molecules that may be administered with the Therapeutics of the invention include, but are not limited to, soluble forms of TNF-alpha, lymphotoxin-alpha (LT-alpha, also known as TNF-beta), LT-beta (found in complex heterotrimer LT-alpha2-beta), OPGL, FasL, CD27L, CD30L, CD40L, 4-1BBL, DcR3, OX40L, TNF-gamma (International Publication No. WO 96/14328), AIM-1 (International Publication No. WO 97/33899), endokine-alpha (International Publication No. WO 98/07880), OPG, and neutrokine-alpha (International Publication No. WO 98/18921, OX40, and nerve growth factor (NGF), and soluble forms of Fas, CD30, CD27, CD40 and 4-IBB, TR2 (International Publication No. WO 96/34095), DR3 (International Publication No. WO 97/33904), DR4 (International Publication No. WO 98/32856), TR5 (International Publication No. WO 98/30693), TRANK, TR9 (International Publication No. WO 98/56892),TR1O (International Publication No. WO 98/54202), 312C2 (International Publication No. WO 98/06842), and TR12, and soluble forms CD154, CD70, and CD153.

[0993] In an additional embodiment, the Therapeutics of the invention are administered in combination with angiogenic proteins. Angiogenic proteins that may be administered with the Therapeutics of the invention include, but are not limited to, Glioma Derived Growth Factor (GDGF), as disclosed in European Patent Number EP-399816; Platelet Derived Growth Factor-A (PDGF-A), as disclosed in European Patent Number EP-682110; Platelet Derived Growth Factor-B (PDGF-B), as disclosed in European Patent Number EP-282317; Placental Growth Factor (PIGF), as disclosed in International Publication Number WO 92/06194; Placental Growth Factor-2 (PIGF-2), as disclosed in Hauser et al., Growth Factors, 4:259-268 (1993); Vascular Endothelial Growth Factor (VEGF), as disclosed in International Publication Number WO 90/13649; Vascular Endothelial Growth Factor-A (VEGF-A), as disclosed in European Patent Number EP-506477; Vascular Endothelial Growth Factor-2 (VEGF-2), as disclosed in International Publication Number WO 96/39515; Vascular Endothelial Growth Factor B (VEGF-3); Vascular Endothelial Growth Factor B-1 86 (VEGF-B186), as disclosed in International Publication Number WO 96/26736; Vascular Endothelial Growth Factor-D (VEGF-D), as disclosed in International Publication Number WO 98/02543; Vascular Endothelial Growth Factor-D (VEGF-D), as disclosed in International Publication Number WO 98/07832; and Vascular Endothelial Growth Factor-E (VEGF-E), as disclosed in German Patent Number DE19639601. The above mentioned references are herein incorporated by reference in their entireties.

[0994] In an additional embodiment, the Therapeutics of the invention are administered in combination with Fibroblast Growth Factors. Fibroblast Growth Factors that may be administered with the Therapeutics of the invention include, but are not limited to, FGF-1, FGF-2, FGF-3, FGF-4, FGF-5, FGF-6, FGF-7, FGF-8, FGF-9, FGF-10, FGF-11, FGF-12, FGF-13, FGF-14, and FGF-15.

[0995] In an additional embodiment, the Therapeutics of the invention are administered in combination with hematopoietic growth factors. Hematopoietic growth factors that may be administered with the Therapeutics of the invention include, but are not limited to, granulocyte macrophage colony stimulating factor (GM-CSF) (sargramostim, LEUKINE™, PROKINE™), granulocyte colony stimulating factor (G-CSF) (filgrastim, NEUPOGEN™), macrophage colony stimulating factor (M-CSF, CSF-1) erythropoietin (epoetin alfa, EPOGEN™, PROCRIT™), stem cell factor (SCF, c-kit ligand, steel factor), megakaryocyte colony stimulating factor, PIXY321 (a GMCSF/IL-3 fusion protein), interleukins, especially any one or more of IL-1 through IL-12, interferon-gamma, or thrombopoietin.

[0996] In certain embodiments, Therapeutics of the present invention are administered in combination with adrenergic blockers, such as, for example, acebutolol, atenolol, betaxolol, bisoprolol, carteolol, labetalol, metoprolol, nadolol, oxprenolol, penbutolol, pindolol, propranolol, sotalol, and timolol.

[0997] In another embodiment, the Therapeutics of the invention are administered in combination with an antiarrhythmic drug (e.g., adenosine, amidoarone, bretylium, digitalis, digoxin, digitoxin, diliazem, disopyramide, esmolol, flecainide, lidocaine, mexiletine, moricizine, phenytoin, procainamide, N-acetyl procainamide, propafenone, propranolol, quinidine, sotalol, tocainide, and verapamil).

[0998] In another embodiment, the Therapeutics of the invention are administered in combination with diuretic agents, such as carbonic anhydrase-inhibiting agents (e.g., acetazolamide, dichlorphenamide, and methazolamide), osmotic diuretics (e.g., glycerin, isosorbide, mannitol, and urea), diuretics that inhibit Na⁺-K⁺-2Cl⁻ symport (e.g., furosemide, bumetanide, azosemide, piretanide, tripamide, ethacrynic acid, muzolimine, and torsemide), thiazide and thiazide-like diuretics (e.g., bendroflumethiazide, benzthiazide, chlorothiazide, hydrochlorothiazide, hydroflumethiazide, methyclothiazide, polythiazide, trichormethiazide, chlorthalidone, indapamide, metolazone, and quinethazone), potassium sparing diuretics (e.g., amiloride and triamterene), and mineralcorticoid receptor antagonists (e.g., spironolactone, canrenone, and potassium canrenoate).

[0999] In one embodiment, the Therapeutics of the invention are administered in combination with treatments for endocrine and/or hormone imbalance disorders. Treatments for endocrine and/or hormone imbalance disorders include, but are not limited to, ¹²⁷I, radioactive isotopes of iodine such as ¹³¹I and ¹²³I; recombinant growth hormone, such as HUMATROPE™ (recombinant somatropin); growth hormone analogs such as PROTROPIN™ (somatrem); dopamine agonists such as PARLODEL™ (bromocriptine); somatostatin analogs such as SANDOSTATIN™ (octreotide); gonadotropin preparations such as PREGNYL™, A.P.L.™ and PROFASI™ (chorionic gonadotropin (CG)), PERGONAL™ (menotropins), and METRODIN™ (urofollitropin (uFSH)); synthetic human gonadotropin releasing hormone preparations such as FACTREL™ and LUTREPULSE™ (gonadorelin hydrochloride); synthetic gonadotropin agonists such as LUPRON™ (leuprolide acetate), SUPPRELIN™ (histrelin acetate), SYNAREL™ (nafarelin acetate), and ZOLADEX™ (goserelin acetate); synthetic preparations of thyrotropin-releasing hormone such as RELEFACT TRH™ and THYPINONE™ (protirelin); recombinant human TSH such as THYROGEN™; synthetic preparations of the sodium salts of the natural isomers of thyroid hormones such as L-T₄™, SYNTHROID™ and LEVOTHROID™ (levothyroxine sodium), L-T₃™, CYTOMEL™ and TRIOSTAT™ (liothyroine sodium), and THYROLAR™ (liotrix); antithyroid compounds such as 6-n-propylthiouracil (propylthiouracil), 1-methyl-2-mercaptoimidazole and TAPAZOLE™ (methimazole), NEO-MERCAZOLE™ (carbimazole); beta-adrenergic receptor antagonists such as propranolol and esmolol; Ca²⁺ channel blockers; dexamethasone and iodinated radiological contrast agents such as TELEPAQUE™ (iopanoic acid) and ORAGRAFIN™ (sodium ipodate); estrogens or congugated estrogens such as ESTRACE™ (estradiol), ESTINYL™ (ethinyl estradiol), PREMARIN™, ESTRATAB™, ORTHO-EST™, OGEN™ and estropipate (estrone), ESTROVIS™ (quinestrol), ESTRADERMT™ (estradiol), DELESTROGEN™ and VALERGEN™ (estradiol valerate), DEPO-ESTRADIOL CYPIONATE™ and ESTROJECT LA™ (estradiol cypionate); antiestrogens such as NOLVADEX™ (tamoxifen), SEROPHENE™ and CLOMID™ (clomiphene); progestins such as DURALUTIN™ (hydroxyprogesterone caproate), MPA™ and DEPO-PROVERA™ (medroxyprogesterone acetate), PROVERA™ and CYCRIN™ (MPA), MEGACE™ (megestrol acetate), NORLUTIN™ (norethindrone), and NORLUTATE™ and AYGESTIN™ (norethindrone acetate); progesterone implants such as NORPLANT SYSTEM™ (subdermal implants of norgestrel); antiprogestins such as RU 486™ (mifepristone); hormonal contraceptives such as ENOVID™ (norethynodrel plus mestranol), PROGESTASERT™ (intrauterine device that releases progesterone), LOESTRIN™, BREVICON™, MODICON™, GENORA™, NELONA™, NORINYL™, OVACON-35™ and OVACON-50™ (ethinyl estradiol/norethindrone), LEVLEN™, NORDETTE™, TRI-LEVLEN™ and TRIPHASIL-21™ (ethinyl estradiol/levonorgestrel) LO/OVRAL™ and OVRAL™ (ethinyl estradiol/norgestrel), DEMULEN™ (ethinyl estradiol/ethynodiol diacetate), NORINYL™, ORTHO-NOVUM™, NORETHIN™, GENORA™, and NELOVA™ (norethindrone/mestranol), DESOGEN™ and ORTHO-CEPT™ (ethinyl estradiol/desogestrel), ORTHO-CYCLEN™ and ORTHO-TRICYCLEN™ (ethinyl estradiol/norgestimate), MICRONOR™ and NOR-QD™ (norethindrone), and OVRETTE™ (norgestrel); testosterone esters such as methenolone acetate and testosterone undecanoate; parenteral and oral androgens such as TESTOJECT-50™ (testosterone), TESTEX™ (testosterone propionate), DELATESTRYL™ (testosterone enanthate), DEPO-TESTOSTERONE™ (testosterone cypionate), DANOCRINE™ (danazol), HALOTESTIN™ (fluoxymesterone), ORETON METHYL™, TESTRED™ and VIRILON™ (methyltestosterone), and OXANDRIN™ (oxandrolone); testosterone transdermal systems such as TESTODERM™; androgen receptor antagonist and 5-alpha-reductase inhibitors such as ANDROCUR™ (cyproterone acetate), EULEXIN™ (flutamide), and PROSCAR™ (finasteride); adrenocorticotropic hormone preparations such as CORTROSYN™ (cosyntropin); adrenocortical steroids and their synthetic analogs such as ACLOVATE™ (alclometasone dipropionate), CYCLOCORT™ (amcinonide), BECLOVENT™ and VANCERIL™ (beclomethasone dipropionate), CELESTONE™ (betamethasone), BENISONE™ and UTICORT™ (betamethasone benzoate), DIPROSONE™ (betamethasone dipropionate), CELESTONE PHOSPHATE™ (betamethasone sodium phosphate), CELESTONE SOLUSPAN™ (betamethasone sodium phosphate and acetate), BETA-VAL™ and VALISONE™ (betamethasone valerate), TEMOVATE™ (clobetasol propionate), CLODERM™ (clocortolone pivalate), CORTEF™ and HYDROCORTONE™ (cortisol (hydrocortisone)), HYDROCORTONE ACETATE™ (cortisol (hydrocortisone) acetate), LOCOID™ (cortisol (hydrocortisone) butyrate), HYDROCORTONE PHOSPHATE™ (cortisol (hydrocortisone) sodium phosphate), A-HYDROCORT™ and SOLU CORTEF™ (cortisol (hydrocortisone) sodium succinate), WESTCORT™ (cortisol (hydrocortisone) valerate), CORTISONE ACETATE™ (cortisone acetate), DESOWEN™ and TRIDESILON™ (desonide), TOPICORT™ (desoximetasone), DECADRON™ (dexamethasone), DECADRON LA™ (dexamethasone acetate), DECADRON PHOSPHATE™ and HEXADROL PHOSPHATE™ (dexamethasone sodium phosphate), FLORONE™ and MAXIFLOR™ (diflorasone diacetate), FLORINEF ACETATE™ (fludrocortisone acetate), AEROBID™ and NASALIDE™ (flunisolide), FLUONID™ and SYNALAR™ (fluocinolone acetonide), LIDEX™ (fluocinonide), FLUOR-OP™ and FML™ (fluorometholone), CORDRAN™ (flurandrenolide), HALOG™ (halcinonide), HMS LIZUIFILM™ (medrysone), MEDROL™ (methylprednisolone), DEPO-MEDROL™ and MEDROL ACETATE™ (methylprednisone acetate), A-METHAPRED™ and SOLUMEDROL™ (methylprednisolone sodium succinate), ELOCON™ (mometasone furoate), HALDRONE™ (paramethasone acetate), DELTA-CORTEF™ (prednisolone), ECONOPRED™ (prednisolone acetate), HYDELTRASOL™ (prednisolone sodium phosphate), HYDELTRA-T.B.A™ (prednisolone tebutate), DELTASONE™ (prednisone), ARISTOCORT™ and KENACORT™ (triamcinolone), KENALOG™ (triamcinolone acetonide), ARISTOCORT™ and KENACORT DIACETATE™ (triamcinolone diacetate), and ARISTOSPAN™ (triamcinolone hexacetonide); inhibitors of biosynthesis and action of adrenocortical steroids such as CYTADREN™ (aminoglutethimide), NIZORAL™ (ketoconazole), MODRASTANE™ (trilostane), and METOPIRONE™ (metyrapone); bovine, porcine or human insulin or mixtures thereof; insulin analogs; recombinant human insulin such as HUMULIN™ and NOVOLIN™; oral hypoglycemic agents such as ORAMIDE™ and ORINASE™ (tolbutamide), DIABINESE™ (chlorpropamide), TOLAMIDE™ and TOLINASE™ (tolazamide), DYMELOR™ (acetohexamide), glibenclamide, MICRONASE™, DIBETA™ and GLYNASE™ (glyburide), GLUCOTROL™ (glipizide), and DIAMICRON™ (gliclazide), GLUCOPHAGE™ (metformin), ciglitazone, pioglitazone, and alpha-glucosidase inhibitors; bovine or porcine glucagon; somatostatins such as SANDOSTATIN™ (octreotide); and diazoxides such as PROGLYCEM™ (diazoxide).

[1000] In one embodiment, the Therapeutics of the invention are administered in combination with treatments for uterine motility disorders. Treatments for uterine motility disorders include, but are not limited to, estrogen drugs such as conjugated estrogens (e.g., PREMARIN® and ESTRATAB®), estradiols (e.g., CLIMARA® and ALORA®), estropipate, and chlorotrianisene; progestin drugs (e.g., AMEN® (medroxyprogesterone), MICRONOR® (norethidrone acetate), PROMETRIUM® progesterone, and megestrol acetate); and estrogen/progesterone combination therapies such as, for example, conjugated estrogens/medroxyprogesterone (e.g., PREMPRO™ and PREMPHASE®) and norethindrone acetate/ethinyl estsradiol (e.g., FEMHRT™).

[1001] In an additional embodiment, the Therapeutics of the invention are administered in combination with drugs effective in treating iron deficiency and hypochromic anemias, including but not limited to, ferrous sulfate (iron sulfate, FEOSOL™), ferrous fumarate (e.g., FEOSTAT™), ferrous gluconate (e.g., FERGON™), polysaccharide-iron complex (e.g., NIFEREX™), iron dextran injection (e.g., INFED™ ), cupric sulfate, pyroxidine, riboflavin, Vitamin B₁₂, cyancobalamin injection (e.g., REDISOL™, RUBRAMIN PC™), hydroxocobalamin, folic acid (e.g., FOLVITE™), leucovorin (folinic acid, 5-CHOH4PteGlu, citrovorum factor) or WELLCOVORIN (Calcium salt of leucovorin), transferrin or ferritin.

[1002] In certain embodiments, the Therapeutics of the invention are administered in combination with agents used to treat psychiatric disorders. Psychiatric drugs that may be administered with the Therapeutics of the invention include, but are not limited to, antipsychotic agents (e.g., chlorpromazine, chlorprothixene, clozapine, fluphenazine, haloperidol, loxapine, mesoridazine, molindone, olanzapine, perphenazine, pimozide, quetiapine, risperidone, thioridazine, thiothixene, trifluoperazine, and triflupromazine), antimanic agents (e.g., carbamazepine, divalproex sodium, lithium carbonate, and lithium citrate), antidepressants (e.g., amitriptyline, amoxapine, bupropion, citalopram, clomipramine, desipramine, doxepin, fluvoxamine, fluoxetine, imipramine, isocarboxazid, maprotiline, mirtazapine, nefazodone, nortriptyline, paroxetine, phenelzine, protriptyline, sertraline, tranylcypromine, trazodone, trimipramine, and venlafaxine), antianxiety agents (e.g., alprazolam, buspirone, chlordiazepoxide, clorazepate, diazepam, halazepam, lorazepam, oxazepam, and prazepam), and stimulants (e.g., d-amphetamine, methylphenidate, and pemoline).

[1003] In other embodiments, the Therapeutics of the invention are administered in combination with agents used to treat neurological disorders. Neurological agents that may be administered with the Therapeutics of the invention include, but are not limited to, antiepileptic agents (e.g., carbamazepine, clonazepam, ethosuximide, phenobarbital, phenytoin, primidone, valproic acid, divalproex sodium, felbamate, gabapentin, lamotrigine, levetiracetam, oxcarbazepine, tiagabine, topiramate, zonisamide, diazepam, lorazepam, and clonazepam), antiparkinsonian agents (e.g., levodopa/carbidopa, selegiline, amantidine, bromocriptine, pergolide, ropinirole, pramipexole, benztropine; biperiden; ethopropazine; procyclidine; trihexyphenidyl, tolcapone), and ALS therapeutics (e.g. riluzole).

[1004] In another embodiment, Therapeutics of the invention are administered in combination with vasodilating agents and/or calcium channel blocking agents. Vasodilating agents that may be administered with the Therapeutics of the invention include, but are not limited to, Angiotensin Converting Enzyme (ACE) inhibitors (e.g., papaverine, isoxsuprine, benazepril, captopril, cilazapril, enalapril, enalaprilat, fosinopril, lisinopril, moexipril, perindopril, quinapril, ramipril, spirapril, trandolapril, and nylidrin), and nitrates (e.g., isosorbide dinitrate, isosorbide mononitrate, and nitroglycerin). Examples of calcium channel blocking agents that may be administered in combination with the Therapeutics of the invention include, but are not limited to amlodipine, bepridil, diltiazem, felodipine, flunarizine, isradipine, nicardipine, nfedipine, nimodipine, and verapamil.

[1005] In additional embodiments, the Therapeutics of the invention are administered in combination with other therapeutic or prophylactic regimens, such as, for example, radiation therapy.

### Example 14

### Method of Treating Decreased Levels of the Polypeptide

[1006] The present invention relates to a method for treating an individual in need of an increased level of a polypeptide of the invention in the body comprising administering to such an individual a composition comprising a therapeutically effective amount of an agonist of the invention (including polypeptides of the invention). Moreover, it will be appreciated that conditions caused by a decrease in the standard or normal expression level of a polypeptide of the present invention in an individual can be treated by administering the agonist or antagonist of the present invention. Thus, the invention also provides a method of treatment of an individual in need of an increased level of the polypeptide comprising administering to such an individual a Therapeutic comprising an amount of the agonist or antagonist to increase the activity level of the polypeptide in such an individual.

[1007] For example, a patient with decreased levels of a polypeptide receives a daily dose 0.1-100 ug/kg of the agonist or antagonist for six consecutive days. The exact details of the dosing scheme, based on administration and formulation, are provided in Example 13.

### Example 15

### Method of Treating Increased Levels of the Polypeptide

[1008] The present invention also relates to a method of treating an individual in need of a decreased level of a polypeptide of the invention in the body comprising administering to such an individual a composition comprising a therapeutically effective amount of an antagonist of the invention (including polypeptides and antibodies of the invention).

[1009] In one example, antisense technology is used to inhibit production of a polypeptide of the present invention. This technology is one example of a method of decreasing levels of a polypeptide, due to a variety of etiologies, such as cancer.

[1010] For example, a patient diagnosed with abnormally increased levels of a polypeptide is administered intravenously antisense polynucleotides at 0.5, 1.0, 1.5, 2.0 and 3.0 mg/kg day for 21 days. This treatment is repeated after a 7-day rest period if the treatment was well tolerated. The formulation of the antisense polynucleotide is provided in Example 13.

### Example 16

### Method of Treatment Using Gene Therapy-Ex Vivo

[1011] One method of gene therapy transplants fibroblasts, which are capable of expressing a polypeptide, onto a patient. Generally, fibroblasts are obtained from a subject by skin biopsy. The resulting tissue is placed in tissue-culture medium and separated into small pieces. Small chunks of the tissue are placed on a wet surface of a tissue culture flask, approximately ten pieces are placed in each flask. The flask is turned upside down, closed tight and left at room temperature over night. After 24 hours at room temperature, the flask is inverted and the chunks of tissue remain fixed to the bottom of the flask and fresh media (e.g., Ham's F12 media, with 10% FBS, penicillin and streptomycin) is added. The flasks are then incubated at 37 degree C. for approximately one week.

[1012] At this time, fresh media is added and subsequently changed every several days. After an additional two weeks in culture, a monolayer of fibroblasts emerge. The monolayer is trypsinized and scaled into larger flasks.

[1013] pMV-7 (Kirschmeier, P. T. et al., DNA, 7:219-25 (1988)), flanked by the long terminal repeats of the Moloney murine sarcoma virus, is digested with EcoRI and HindIII and subsequently treated with calf intestinal phosphatase. The linear vector is fractionated on agarose gel and purified, using glass beads.

[1014] The cDNA encoding a polypeptide of the present invention can be amplified using PCR primers which correspond to the 5′ and 3′ end sequences respectively as set forth in Example 1 using primers and having appropriate restriction sites and initiation/stop codons, if necessary. Preferably, the 5′ primer contains an EcoRI site and the 3′ primer includes a HindIII site. Equal quantities of the Moloney murine sarcoma virus linear backbone and the amplified EcoRI and HindIII fragment are added together, in the presence of T4 DNA ligase. The resulting mixture is maintained under conditions appropriate for ligation of the two fragments. The ligation mixture is then used to transform bacteria HB101, which are then plated onto agar containing kanamycin for the purpose of confirming that the vector has the gene of interest properly inserted.

[1015] The amphotropic pA317 or GP+am12 packaging cells are grown in tissue culture to confluent density in Dulbecco's Modified Eagles Medium (DMEM) with 10% calf serum (CS), penicillin and streptomycin. The MSV vector containing the gene is then added to the media and the packaging cells transduced with the vector. The packaging cells now produce infectious viral particles containing the gene (the packaging cells are now referred to as producer cells).

[1016] Fresh media is added to the transduced producer cells, and subsequently, the media is harvested from a 10 cm plate of confluent producer cells. The spent media, containing the infectious viral particles, is filtered through a millipore filter to remove detached producer cells and this media is then used to infect fibroblast cells. Media is removed from a sub-confluent plate of fibroblasts and quickly replaced with the media from the producer cells. This media is removed and replaced with fresh media. If the titer of virus is high, then virtually all fibroblasts will be infected and no selection is required. If the titer is very low, then it is necessary to use a retroviral vector that has a selectable marker, such as neo or his. Once the fibroblasts have been efficiently infected, the fibroblasts are analyzed to determine whether protein is produced.

[1017] The engineered fibroblasts are then transplanted onto the host, either alone or after having been grown to confluence on cytodex 3 microcarrier beads.

### Example 17

### Gene Therapy Using Endogenous Genes Corresponding To Polynucleotides of the Invention

[1018] Another method of gene therapy according to the present invention involves operably associating the endogenous polynucleotide sequence of the invention with a promoter via homologous recombination as described, for example, in U.S. Pat. No. 5,641,670, issued Jun. 24, 1997; International Publication NO: WO 96/29411, published Sep. 26, 1996; International Publication NO: WO 94/12650, published Aug. 4, 1994; Koller et al., Proc. Natl. Acad. Sci. USA, 86:8932-8935 (1989); and Zijlstra et al., Nature, 342:435-438 (1989). This method involves the activation of a gene which is present in the target cells, but which is not expressed in the cells, or is expressed at a lower level than desired.

[1019] Polynucleotide constructs are made which contain a promoter and targeting sequences, which are homologous to the 5′ non-coding sequence of endogenous polynucleotide sequence, flanking the promoter. The targeting sequence will be sufficiently near the 5′ end of the polynucleotide sequence so the promoter will be operably linked to the endogenous sequence upon homologous recombination. The promoter and the targeting sequences can be amplified using PCR. Preferably, the amplified promoter contains distinct restriction enzyme sites on the 5′ and 3′ ends. Preferably, the 3′ end of the first targeting sequence contains the same restriction enzyme site as the 5′ end of the amplified promoter and the 5′ end of the second targeting sequence contains the same restriction site as the 3′ end of the amplified promoter.

[1020] The amplified promoter and the amplified targeting sequences are digested with the appropriate restriction enzymes and subsequently treated with calf intestinal phosphatase. The digested promoter and digested targeting sequences are added together in the presence of T4 DNA ligase. The resulting mixture is maintained under conditions appropriate for ligation of the two fragments. The construct is size fractionated on an agarose gel, then purified by phenol extraction and ethanol precipitation.

[1021] In this Example, the polynucleotide constructs are administered as naked polynucleotides via electroporation. However, the polynucleotide constructs may also be administered with transfection-facilitating agents, such as liposomes, viral sequences, viral particles, precipitating agents, etc. Such methods of delivery are known in the art.

[1022] Once the cells are transfected, homologous recombination will take place which results in the promoter being operably linked to the endogenous polynucleotide sequence. This results in the expression of polynucleotide corresponding to the polynucleotide in the cell. Expression may be detected by immunological staining, or any other method known in the art.

[1023] Fibroblasts are obtained from a subject by skin biopsy. The resulting tissue is placed in DMEM+10% fetal calf serum. Exponentially growing or early stationary phase fibroblasts are trypsinized and rinsed from the plastic surface with nutrient medium. An aliquot of the cell suspension is removed for counting, and the remaining cells are subjected to centrifugation. The supernatant is aspirated and the pellet is resuspended in 5 ml of electroporation buffer (20 mM HEPES pH 7.3, 137 mM NaCl, 5 mM KCl, 0.7 mM Na₂ HPO₄, 6 mM dextrose). The cells are recentrifuged, the supernatant aspirated, and the cells resuspended in electroporation buffer containing 1 mg/ml acetylated bovine serum albumin. The final cell suspension contains approximately 3×10⁶ cells/ml. Electroporation should be performed immediately following resuspension.

[1024] Plasmid DNA is prepared according to standard techniques. For example, to construct a plasmid for targeting to the locus corresponding to the polynucleotide of the invention, plasmid pUC18 (MBI Fermentas, Amherst, N.Y.) is digested with HindIII. The CMV promoter is amplified by PCR with an XbaI site on the 5′ end and a BamHI site on the 3′ end. Two non-coding sequences are amplified via PCR: one non-coding sequence (fragment 1) is amplified with a HindIII site at the 5′ end and an Xba site at the 3′ end; the other non-coding sequence (fragment 2) is amplified with a BamHI site at the 5′ end and a HindIII site at the 3′ end. The CMV promoter and the fragments (1 and 2) are digested with the appropriate enzymes (CMV promoter-XbaI and BamHI; fragment 1-XbaI; fragment 2-BamHI) and ligated together. The resulting ligation product is digested with HindIII, and ligated with the HindIII-digested pUC 18 plasmid.

[1025] Plasmid DNA is added to a sterile cuvette with a 0.4 cm electrode gap (Bio-Rad). The final DNA concentration is generally at least 120 μg/ml. 0.5 ml of the cell suspension (containing approximately 1.5.×10⁶ cells) is then added to the cuvette, and the cell suspension and DNA solutions are gently mixed. Electroporation is performed with a Gene-Pulser apparatus (Bio-Rad). Capacitance and voltage are set at 960 μF and 250-300 V, respectively. As voltage increases, cell survival decreases, but the percentage of surviving cells that stably incorporate the introduced DNA into their genome increases dramatically. Given these parameters, a pulse time of approximately 14-20 mSec should be observed.

[1026] Electroporated cells are maintained at room temperature for approximately 5 min, and the contents of the cuvette are then gently removed with a sterile transfer pipette. The cells are added directly to 10 ml of prewarmed nutrient media (DMEM with 15% calf serum) in a 10 cm dish and incubated at 37 degree C. The following day, the media is aspirated and replaced with 10 ml of fresh media and incubated for a further 16-24 hours.

[1027] The engineered fibroblasts are then injected into the host, either alone or after having been grown to confluence on cytodex 3 microcarrier beads. The fibroblasts now produce the protein product. The fibroblasts can then be introduced into a patient as described above.

### Example 18

### Method of Treatment Using Gene Therapy—In vivo

[1028] Another aspect of the present invention is using in vivo gene therapy methods to treat disorders, diseases and conditions. The gene therapy method relates to the introduction of naked nucleic acid (DNA, RNA, and antisense DNA or RNA) sequences into an animal to increase or decrease the expression of the polypeptide. The polynucleotide of the present invention may be operatively linked to (i.e., associated with) a promoter or any other genetic elements necessary for the expression of the polypeptide by the target tissue. Such gene therapy and delivery techniques and methods are known in the art, see, for example, WO90/11092, WO98/11779; U.S. Pat. NO. 5693622, 5705151, 5580859; Tabata et al., Cardiovasc. Res. 35(3):470-479 (1997); Chao et al., Pharmacol. Res. 35(6):517-522 (1997); Wolff, Neuromuscul. Disord. 7(5):314-318 (1997); Schwartz et al., Gene Ther. 3(5):405-411 (1996); Tsurumi et al., Circulation 94(12):3281-3290 (1996) (incorporated herein by reference).

[1029] The polynucleotide constructs may be delivered by any method that delivers injectable materials to the cells of an animal, such as, injection into the interstitial space of tissues (heart, muscle, skin, lung, liver, intestine and the like). The polynucleotide constructs can be delivered in a pharmaceutically acceptable liquid or aqueous carrier.

[1030] The term “naked” polynucleotide, DNA or RNA, refers to sequences that are free from any delivery vehicle that acts to assist, promote, or facilitate entry into the cell, including viral sequences, viral particles, liposome formulations, lipofectin or precipitating agents and the like. However, the polynucleotides of the present invention may also be delivered in liposome formulations (such as those taught in Felgner P. L. et al. (1995) Ann. NY Acad. Sci. 772:126-139 and Abdallah B. et al. (1995) Biol. Cell 85(1):1-7) which can be prepared by methods well known to those skilled in the art.

[1031] The polynucleotide vector constructs used in the gene therapy method are preferably constructs that will not integrate into the host genome nor will they contain sequences that allow for replication. Any strong promoter known to those skilled in the art can be used for driving the expression of DNA. Unlike other gene therapy techniques, one major advantage of introducing naked nucleic acid sequences into target cells is the transitory nature of the polynucleotide synthesis in the cells. Studies have shown that non-replicating DNA sequences can be introduced into cells to provide production of the desired polypeptide for periods of up to six months.

[1032] The polynucleotide construct can be delivered to the interstitial space of tissues within an animal, including muscle, skin, brain, lung, liver, spleen, bone marrow, thymus, heart, lymph, blood, bone, cartilage, pancreas, kidney, gall bladder, stomach, intestine, testis, ovary, uterus, rectum, nervous system, eye, gland, and connective tissue. Interstitial space of the tissues comprises the intercellular fluid, mucopolysaccharide matrix among the reticular fibers of organ tissues, elastic fibers in the walls of vessels or chambers, collagen fibers of fibrous tissues, or that same matrix within connective tissue ensheathing muscle cells or in the lacunae of bone. It is similarly the space occupied by the plasma of the circulation and the lymph fluid of the lymphatic channels. Delivery to the interstitial space of muscle tissue is preferred for the reasons discussed below. They may be conveniently delivered by injection into the tissues comprising these cells. They are preferably delivered to and expressed in persistent, non-dividing cells which are differentiated, although delivery and expression may be achieved in non-differentiated or less completely differentiated cells, such as, for example, stem cells of blood or skin fibroblasts. In vivo muscle cells are particularly competent in their ability to take up and express polynucleotides.

[1033] For the naked polynucleotide injection, an effective dosage amount of DNA or RNA will be in the range of from about 0.05 g/kg body weight to about 50 mg/kg body weight. Preferably the dosage will be from about 0.005 mg/kg to about 20 mg/kg and more preferably from about 0.05 mg/kg to about 5 mg/kg. Of course, as the artisan of ordinary skill will appreciate, this dosage will vary according to the tissue site of injection. The appropriate and effective dosage of nucleic acid sequence can readily be determined by those of ordinary skill in the art and may depend on the condition being treated and the route of administration. The preferred route of administration is by the parenteral route of injection into the interstitial space of tissues. However, other parenteral routes may also be used, such as, inhalation of an aerosol formulation particularly for delivery to lungs or bronchial tissues, throat or mucous membranes of the nose. In addition, naked polynucleotide constructs can be delivered to arteries during angioplasty by the catheter used in the procedure.

[1034] The dose response effects of injected polynucleotide in muscle in vivo is determined as follows. Suitable template DNA for production of mRNA coding for polypeptide of the present invention is prepared in accordance with a standard recombinant DNA methodology. The template DNA, which may be either circular or linear, is either used as naked DNA or complexed with liposomes. The quadriceps muscles of mice are then injected with various amounts of the template DNA.

[1035] Five to six week old female and male Balb/C mice are anesthetized by intraperitoneal injection with 0.3 ml of 2.5% Avertin. A 1.5 cm incision is made on the anterior thigh, and the quadriceps muscle is directly visualized. The template DNA is injected in 0.1 ml of carrier in a 1 cc syringe through a 27 gauge needle over one minute, approximately 0.5 cm from the distal insertion site of the muscle into the knee and about 0.2 cm deep. A suture is placed over the injection site for future localization, and the skin is closed with stainless steel clips.

[1036] After an appropriate incubation time (e.g., 7 days) muscle extracts are prepared by excising the entire quadriceps. Every fifth 15 μm cross-section of the individual quadriceps muscles is histochemically stained for protein expression. A time course for protein expression may be done in a similar fashion except that quadriceps from different mice are harvested at different times. Persistence of DNA in muscle following injection may be determined by Southern blot analysis after preparing total cellular DNA and HIRT supernatants from injected and control mice. The results of the above experimentation in mice can be used to extrapolate proper dosages and other treatment parameters in humans and other animals using naked DNA.

### Example 19

### Transgenic Animals

[1037] The polypeptides of the invention can also be expressed in transgenic animals. Animals of any species, including, but not limited to, mice, rats, rabbits, hamsters, guinea pigs, pigs, micro-pigs, goats, sheep, cows and non-human primates, e.g., baboons, monkeys, and chimpanzees may be used to generate transgenic animals. In a specific embodiment, techniques described herein or otherwise known in the art, are used to express polypeptides of the invention in humans, as part of a gene therapy protocol.

[1038] Any technique known in the art may be used to introduce the transgene (i.e., polynucleotides of the invention) into animals to produce the founder lines of transgenic animals. Such techniques include, but are not limited to, pronuclear microinjection (Paterson et al., Appl. Microbiol. Biotechnol. 40:691-698 (1994); Carver et al., Biotechnology (NY) 11:1263-1270 (1993); Wright et al., Biotechnology (NY) 9:830-834 (1991); and Hoppe et al., U.S. Pat. No. 4,873,191 (1989)); retrovirus mediated gene transfer into germ lines (Van der Putten et al., Proc. Natl. Acad. Sci., USA 82:6148-6152 (1985)), blastocysts or embryos; gene targeting in embryonic stem cells (Thompson et al., Cell 56:313-321 (1989)); electroporation of cells or embryos (Lo, 1983, Mol Cell. Biol. 3:1803-1814 (1983)); introduction of the polynucleotides of the invention using a gene gun (see, e.g., Ulmer et al., Science 259:1745 (1993); introducing nucleic acid constructs into embryonic pleuripotent stem cells and transferring the stem cells back into the blastocyst; and sperm-mediated gene transfer (Lavitrano et al., Cell 57:717-723 (1989); etc. For a review of such techniques, see Gordon, “Transgenic Animals,” Intl. Rev. Cytol. 115:171-229 (1989), which is incorporated by reference herein in its entirety.

[1039] Any technique known in the art may be used to produce transgenic clones containing polynucleotides of the invention, for example, nuclear transfer into enucleated oocytes of nuclei from cultured embryonic, fetal, or adult cells induced to quiescence (Campell et al., Nature 380:64-66 (1996); Wilmut et al., Nature 385:810-813 (1997)).

[1040] The present invention provides for transgenic animals that carry the transgene in all their cells, as well as animals which carry the transgene in some, but not all their cells, i.e., mosaic animals or chimeric. The transgene may be integrated as a single transgene or as multiple copies such as in concatamers, e.g., head-to-head tandems or head-to-tail tandems. The transgene may also be selectively introduced into and activated in a particular cell type by following, for example, the teaching of Lasko et al. (Lasko et al., Proc. Natl. Acad. Sci. USA 89:6232-6236 (1992)). The regulatory sequences required for such a cell-type specific activation will depend upon the particular cell type of interest, and will be apparent to those of skill in the art. When it is desired that the polynucleotide transgene be integrated into the chromosomal site of the endogenous gene, gene targeting is preferred. Briefly, when such a technique is to be utilized, vectors containing some nucleotide sequences homologous to the endogenous gene are designed for the purpose of integrating, via homologous recombination with chromosomal sequences, into and disrupting the function of the nucleotide sequence of the endogenous gene. The transgene may also be selectively introduced into a particular cell type, thus inactivating the endogenous gene in only that cell type, by following, for example, the teaching of Gu et al. (Gu et al., Science 265:103-106 (1994)). The regulatory sequences required for such a cell-type specific inactivation will depend upon the particular cell type of interest, and will be apparent to those of skill in the art.

[1041] Once transgenic animals have been generated, the expression of the recombinant gene may be assayed utilizing standard techniques. Initial screening may be accomplished by Southern blot analysis or PCR techniques to analyze animal tissues to verify that integration of the transgene has taken place. The level of mRNA expression of the transgene in the tissues of the transgenic animals may also be assessed using techniques which include, but are not limited to, Northern blot analysis of tissue samples obtained from the animal, in situ hybridization analysis, and reverse transcriptase-PCR (rt-PCR). Samples of transgenic gene-expressing tissue may also be evaluated immunocytochemically or immunohistochemically using antibodies specific for the transgene product.

[1042] Once the founder animals are produced, they may be bred, inbred, outbred, or crossbred to produce colonies of the particular animal. Examples of such breeding strategies include, but are not limited to: outbreeding of founder animals with more than one integration site in order to establish separate lines; inbreeding of separate lines in order to produce compound transgenics that express the transgene at higher levels because of the effects of additive expression of each transgene; crossing of heterozygous transgenic animals to produce animals homozygous for a given integration site in order to both augment expression and eliminate the need for screening of animals by DNA analysis; crossing of separate homozygous lines to produce compound heterozygous or homozygous lines; and breeding to place the transgene on a distinct background that is appropriate for an experimental model of interest.

[1043] Transgenic animals of the invention have uses which include, but are not limited to, animal model systems useful in elaborating the biological function of polypeptides of the present invention, studying conditions and/or disorders associated with aberrant expression, and in screening for compounds effective in ameliorating such conditions and/or disorders.

### Example 20

### Knock-Out Animals

[1044] Endogenous gene expression can also be reduced by inactivating or “knocking out” the gene and/or its promoter using targeted homologous recombination. (See e.g., Smithies et al., Nature 317:230-234 (1985); Thomas & Capecchi, Cell 51:503-512 (1987); Thompson et al., Cell 5:313-321 (1989); each of which is incorporated by reference herein in its entirety.) For example, a mutant, non-functional polynucleotide of the invention (or a completely unrelated DNA sequence) flanked by DNA homologous to the endogenous polynucleotide sequence (either the coding regions or regulatory regions of the gene) can be used, with or without a selectable marker and/or a negative selectable marker, to transfect cells that express polypeptides of the invention in vivo. In another embodiment, techniques known in the art are used to generate knockouts in cells that contain, but do not express the gene of interest. Insertion of the DNA construct, via targeted homologous recombination, results in inactivation of the targeted gene. Such approaches are particularly suited in research and agricultural fields where modifications to embryonic stem cells can be used to generate animal offspring with an inactive targeted gene (e.g., see Thomas & Capecchi 1987 and Thompson 1989, supra). However this approach can be routinely adapted for use in humans provided the recombinant DNA constructs are directly administered or targeted to the required site in vivo using appropriate viral vectors that will be apparent to those of skill in the art.

[1045] In further embodiments of the invention, cells that are genetically engineered to express the polypeptides of the invention, or alternatively, that are genetically engineered not to express the polypeptides of the invention (e.g., knockouts) are administered to a patient in vivo. Such cells may be obtained from the patient (i.e., animal, including human) or an MHC compatible donor and can include, but are not limited to fibroblasts, bone marrow cells, blood cells (e.g., lymphocytes), adipocytes, muscle cells, endothelial cells etc. The cells are genetically engineered in vitro using recombinant DNA techniques to introduce the coding sequence of polypeptides of the invention into the cells, or alternatively, to disrupt the coding sequence and/or endogenous regulatory sequence associated with the polypeptides of the invention, e.g., by transduction (using viral vectors, and preferably vectors that integrate the transgene into the cell genome) or transfection procedures, including, but not limited to, the use of plasmids, cosmids, YACs, naked DNA, electroporation, liposomes, etc. The coding sequence of the polypeptides of the invention can be placed under the control of a strong constitutive or inducible promoter or promoter/enhancer to achieve expression, and preferably secretion, of the polypeptides of the invention. The engineered cells which express and preferably secrete the polypeptides of the invention can be introduced into the patient systemically, e.g., in the circulation, or intraperitoneally.

[1046] Alternatively, the cells can be incorporated into a matrix and implanted in the body, e.g., genetically engineered fibroblasts can be implanted as part of a skin graft; genetically engineered endothelial cells can be implanted as part of a lymphatic or vascular graft. (See, for example, Anderson et al. U.S. Pat. No. 5,399,349; and Mulligan & Wilson, U.S. Pat. No. 5,460,959 each of which is incorporated by reference herein in its entirety).

[1047] When the cells to be administered are non-autologous or non-MHC compatible cells, they can be administered using well known techniques which prevent the development of a host immune response against the introduced cells. For example, the cells may be introduced in an encapsulated form which, while allowing for an exchange of components with the immediate extracellular environment, does not allow the introduced cells to be recognized by the host immune system.

[1048] Transgenic and “knock-out” animals of the invention have uses which include, but are not limited to, animal model systems useful in elaborating the biological function of polypeptides of the present invention, studying conditions and/or disorders associated with aberrant expression, and in screening for compounds effective in ameliorating such conditions and/or disorders.

### Example 21

### Assays Detecting Stimulation or Inhibition of B cell Proliferation and Differentiation

[1049] Generation of functional humoral immune responses requires both soluble and cognate signaling between B-lineage cells and their microenvironment. Signals may impart a positive stimulus that allows a B-lineage cell to continue its programmed development, or a negative stimulus that instructs the cell to arrest its current developmental pathway. To date, numerous stimulatory and inhibitory signals have been found to influence B cell responsiveness including IL-2, IL-4, IL-5, IL-6, IL-7, IL-10, IL-13, IL-14 and IL-15. Interestingly, these signals are by themselves weak effectors but can, in combination with various co-stimulatory proteins, induce activation, proliferation, differentiation, homing, tolerance and death among B cell populations.

[1050] One of the best studied classes of B-cell co-stimulatory proteins is the TNF-superfamily. Within this family CD40, CD27, and CD30 along with their respective ligands CD154, CD70, and CD153 have been found to regulate a variety of immune responses. Assays which allow for the detection and/or observation of the proliferation and differentiation of these B-cell populations and their precursors are valuable tools in determining the effects various proteins may have on these B-cell populations in terms of proliferation and differentiation. Listed below are two assays designed to allow for the detection of the differentiation, proliferation, or inhibition of B-cell populations and their precursors.

[1051] In vitro Assay- Agonists or antagonists of the invention can be assessed for its ability to induce activation, proliferation, differentiation or inhibition and/or death in B-cell populations and their precursors. The activity of the agonists or antagonists of the invention on purified human tonsillar B cells, measured qualitatively over the dose range from 0.1 to 10,000 ng/mL, is assessed in a standard B-lymphocyte co-stimulation assay in which purified tonsillar B cells are cultured in the presence of either formalin-fixed Staphylococcus aureus Cowan I (SAC) or immobilized anti-human IgM antibody as the priming agent. Second signals such as IL-2 and IL-15 synergize with SAC and IgM crosslinking to elicit B cell proliferation as measured by tritiated-thymidine incorporation. Novel synergizing agents can be readily identified using this assay. The assay involves isolating human tonsillar B cells by magnetic bead (MACS) depletion of CD3-positive cells. The resulting cell population is greater than 95% B cells as assessed by expression of CD45R(B220).

[1052] Various dilutions of each sample are placed into individual wells of a 96-well plate to which are added 10⁵ B-cells suspended in culture medium (RPMI 1640 containing 10% FBS, 5×10⁻⁵M 2ME, 100 U/ml penicillin, 10 ug/ml streptomycin, and 10⁻⁵ dilution of SAC) in a total volume of 150 ul. Proliferation or inhibition is quantitated by a 20 h pulse (1 uCi/well) with 3H-thymidine (6.7 Ci/mM) beginning 72 h post factor addition. The positive and negative controls are IL2 and medium respectively.

[1053] In vivo Assay- BALB/c mice are injected (i.p.) twice per day with buffer only, or 2 mg/Kg of agonists or antagonists of the invention, or truncated forms thereof. Mice receive this treatment for 4 consecutive days, at which time they are sacrificed and various tissues and serum collected for analyses. Comparison of H&E sections from normal spleens and spleens treated with agonists or antagonists of the invention identify the results of the activity of the agonists or antagonists on spleen cells, such as the diffusion of peri-arterial lymphatic sheaths, and/or significant increases in the nucleated cellularity of the red pulp regions, which may indicate the activation of the differentiation and proliferation of B-cell populations. Immunohistochemical studies using a B cell marker, anti-CD45R(B220), are used to determine whether any physiological changes to splenic cells, such as splenic disorganization, are due to increased B-cell representation within loosely defined B-cell zones that infiltrate established T-cell regions.

[1054] Flow cytometric analyses of the spleens from mice treated with agonist or antagonist is used to indicate whether the agonists or antagonists specifically increases the proportion of ThB+, CD45R(B220)dull B cells over that which is observed in control mice.

[1055] Likewise, a predicted consequence of increased mature B-cell representation in vivo is a relative increase in serum Ig titers. Accordingly, serum IgM and IgA levels are compared between buffer and agonists or antagonists-treated mice.

[1056] The studies described in this example tested activity of agonists or antagonists of the invention. However, one skilled in the art could easily modify the exemplified studies to test the activity of polynucleotides or polypeptides of the invention (e.g., gene therapy).

### Example 22

### T Cell Proliferation Assay

[1057] A CD3-induced proliferation assay is performed on PBMCs and is measured by the uptake of ³H-thymidine. The assay is performed as follows. Ninety-six well plates are coated with 100 μl/well of mAb to CD3 (HIT3a, Pharmingen) or isotype-matched control mAb (B33.1) overnight at 4 degrees C. (1 μg/ml in 0.05M bicarbonate buffer, pH 9.5), then washed three times with PBS. PBMC are isolated by F/H gradient centrifugation from human peripheral blood and added to quadruplicate wells (5×10⁴/well) of mAb coated plates in RPMI containing 10% FCS and P/S in the presence of varying concentrations of agonists or antagonists of the invention (total volume 200 ul). Relevant protein buffer and medium alone are controls. After 48 hr. culture at 37 degrees C., plates are spun for 2 min. at 1000 rpm and 100 μl of supernatant is removed and stored −20 degrees C. for measurement of IL-2 (or other cytokines) if effect on proliferation is observed. Wells are supplemented with 100 ul of medium containing 0.5 uCi of ³H-thymidine and cultured at 37 degrees C. for 18-24 hr. Wells are harvested and incorporation of ³H-thymidine used as a measure of proliferation. Anti-CD3 alone is the positive control for proliferation. IL-2 (100 U/ml) is also used as a control which enhances proliferation. Control antibody which does not induce proliferation of T cells is used as the negative control for the effects of agonists or antagonists of the invention.

[1058] The studies described in this example tested activity of agonists or antagonists of the invention. However, one skilled in the art could easily modify the exemplified studies to test the activity of polynucleotides or polypeptides of the invention (e.g., gene therapy).

### Example 23

### Effect of Agonists or Antagonists of the Invention on the Expression of MHC Class II, Costimulatory and Adhesion Molecules and Cell Differentiation of Monocytes and Monocyte-Derived Human Dendritic Cells

[1059] Dendritic cells are generated by the expansion of proliferating precursors found in the peripheral blood: adherent PBMC or elutriated monocytic fractions are cultured for 7-10 days with GM-CSF (50 ng/ml) and IL-4 (20 ng/ml). These dendritic cells have the characteristic phenotype of immature cells (expression of CD1, CD80, CD86, CD40 and MHC class II antigens). Treatment with activating factors, such as TNF-α, causes a rapid change in surface phenotype (increased expression of MHC class I and II, costimulatory and adhesion molecules, downregulation of FCγRII, upregulation of CD83). These changes correlate with increased antigen-presenting capacity and with functional maturation of the dendritic cells.

[1060] FACS analysis of surface antigens is performed as follows. Cells are treated 1-3 days with increasing concentrations of agonist or antagonist of the invention or LPS (positive control), washed with PBS containing 1% BSA and 0.02 mM sodium azide, and then incubated with 1:20 dilution of appropriate FITC- or PE-labeled monoclonal antibodies for 30 minutes at 4 degrees C. After an additional wash, the labeled cells are analyzed by flow cytometry on a FACScan (Becton Dickinson).

[1061] Effect on the Production of Cytokines

[1062] Cytokines generated by dendritic cells, in particular IL-12, are important in the initiation of T-cell dependent immune responses. IL-12 strongly influences the development of Thl helper T-cell immune response, and induces cytotoxic T and NK cell function. An ELISA is used to measure the IL-12 release as follows. Dendritic cells (10⁶/ml) are treated with increasing concentrations of agonists or antagonists of the invention for 24 hours. LPS (100 ng/ml) is added to the cell culture as positive control. Supernatants from the cell cultures are then collected and analyzed for IL-12 content using commercial ELISA kit (e.g., R & D Systems (Minneapolis, Minn.)). The standard protocols provided with the kits are used.

[1063] Effect on the Expression of MHC Class II, Costimulatory and Adhesion Molecules

[1064] Three major families of cell surface antigens can be identified on monocytes: adhesion molecules, molecules involved in antigen presentation, and Fc receptor. Modulation of the expression of MHC class II antigens and other costimulatory molecules, such as B7 and ICAM-1, may result in changes in the antigen presenting capacity of monocytes and ability to induce T cell activation. Increased expression of Fc receptors may correlate with improved monocyte cytotoxic activity, cytokine release and phagocytosis.

[1065] FACS analysis is used to examine the surface antigens as follows. Monocytes are treated 1-5 days with increasing concentrations of agonists or antagonists of the invention or LPS (positive control), washed with PBS containing 1% BSA and 0.02 mM sodium azide, and then incubated with 1:20 dilution of appropriate FITC- or PE-labeled monoclonal antibodies for 30 minutes at 4 degrees C. After an additional wash, the labeled cells are analyzed by flow cytometry on a FACScan (Becton Dickinson).

[1066] Monocyte Activation and/or Increased Survival

[1067] Assays for molecules that activate (or alternatively, inactivate) monocytes and/or increase monocyte survival (or alternatively, decrease monocyte survival) are known in the art and may routinely be applied to determine whether a molecule of the invention functions as an inhibitor or activator of monocytes. Agonists or antagonists of the invention can be screened using the three assays described below. For each of these assays, Peripheral blood mononuclear cells (PBMC) are purified from single donor leukopacks (American Red Cross, Baltimore, Md.) by centrifugation through a Histopaque gradient (Sigma). Monocytes are isolated from PBMC by counterflow centrifugal elutriation.

[1068] Monocyte Survival Assay. Human peripheral blood monocytes progressively lose viability when cultured in absence of serum or other stimuli. Their death results from internally regulated processes (apoptosis). Addition to the culture of activating factors, such as TNF-alpha dramatically improves cell survival and prevents DNA fragmentation. Propidium iodide (PI) staining is used to measure apoptosis as follows. Monocytes are cultured for 48 hours in polypropylene tubes in serum-free medium (positive control), in the presence of 100 ng/ml TNF-alpha (negative control), and in the presence of varying concentrations of the compound to be tested. Cells are suspended at a concentration of 2×10⁶/ml in PBS containing PI at a final concentration of 5 μg/ml, and then incubated at room temperature for 5 minutes before FACScan analysis. PI uptake has been demonstrated to correlate with DNA fragmentation in this experimental paradigm.

[1069] Effect on Cytokine Release

[1070] An important function of monocytes/macrophages is their regulatory activity on other cellular populations of the immune system through the release of cytokines after stimulation. An ELISA to measure cytokine release is performed as follows. Human monocytes are incubated at a density of 5×10⁵ cells/ml with increasing concentrations of agonists or antagonists of the invention and under the same conditions, but in the absence of agonists or antagonists. For IL-12 production, the cells are primed overnight with IFN (100 U/ml) in the presence of agonist or antagonist of the invention. LPS (10 ng/ml) is then added. Conditioned media are collected after 24 h and kept frozen until use. Measurement of TNF-alpha, IL-10, MCP-1 and IL-8 is then performed using a commercially available ELISA kit (e.g., R & D Systems (Minneapolis, Minn.)) and applying the standard protocols provided with the kit.

[1071] Oxidative Burst

[1072] Purified monocytes are plated in 96-w plate at 2-1×10⁵ cell/well. Increasing concentrations of agonists or antagonists of the invention are added to the wells in a total volume of 0.2 ml culture medium (RPMI 1640+10% FCS, glutamine and antibiotics). After 3 days incubation, the plates are centrifuged and the medium is removed from the wells. To the macrophage monolayers, 0.2 ml per well of phenol red solution (140 mM NaCl, 10 mM potassium phosphate buffer pH 7.0, 5.5 mM dextrose, 0.56 mM phenol red and 19 U/ml of HRPO) is added, together with the stimulant (200 nM PMA). The plates are incubated at 37° C. for 2 hours and the reaction is stopped by adding 20 μl 1N NaOH per well. The absorbance is read at 610 nm. To calculate the amount of H₂O₂ produced by the macrophages, a standard curve of a H₂O₂ solution of known molarity is performed for each experiment.

[1073] The studies described in this example tested activity of agonists or antagonists of the invention. However, one skilled in the art could easily modify the exemplified studies to test the activity of polynucleotides or polypeptides of the invention (e.g., gene therapy).

### Example 24

### Biological Effects of Agonists or Antagonists of the Invention

### Astrocyte and Neuronal Assays

[1074] Agonists or antagonists of the invention, expressed in Escherichia coli and purified as described above, can be tested for activity in promoting the survival, neurite outgrowth, or phenotypic differentiation of cortical neuronal cells and for inducing the proliferation of glial fibrillary acidic protein immunopositive cells, astrocytes. The selection of cortical cells for the bioassay is based on the prevalent expression of FGF-1 and FGF-2 in cortical structures and on the previously reported enhancement of cortical neuronal survival resulting from FGF-2 treatment. A thymidine incorporation assay, for example, can be used to elucidate an agonist or antagonist of the invention's activity on these cells.

[1075] Moreover, previous reports describing the biological effects of FGF-2 (basic FGF) on cortical or hippocampal neurons in vitro have demonstrated increases in both neuron survival and neurite outgrowth (Walicke et al., “Fibroblast growth factor promotes survival of dissociated hippocampal neurons and enhances neurite extension.” Proc. Natl. Acad. Sci. USA 83:3012-3016. (1986), assay herein incorporated by reference in its entirety). However, reports from experiments done on PC-12 cells suggest that these two responses are not necessarily synonymous and may depend on not only which FGF is being tested but also on which receptor(s) are expressed on the target cells. Using the primary cortical neuronal culture paradigm, the ability of an agonist or antagonist of the invention to induce neurite outgrowth can be compared to the response achieved with FGF-2 using, for example, a thymidine incorporation assay.

### Fibroblast and Endothelial Cell Assays

[1076] Human lung fibroblasts are obtained from Clonetics (San Diego, Calif.) and maintained in growth media from Clonetics. Dermal microvascular endothelial cells are obtained from Cell Applications (San Diego, Calif.). For proliferation assays, the human lung fibroblasts and dermal microvascular endothelial cells can be cultured at 5,000 cells/well in a 96-well plate for one day in growth medium. The cells are then incubated for one day in 0.1% BSA basal medium. After replacing the medium with fresh 0.1% BSA medium, the cells are incubated with the test proteins for 3 days. Alamar Blue (Alamar Biosciences, Sacramento, Calif.) is added to each well to a final concentration of 10%. The cells are incubated for 4 hr. Cell viability is measured by reading in a CytoFluor fluorescence reader. For the PGE₂ assays, the human lung fibroblasts are cultured at 5,000 cells/well in a 96-well plate for one day. After a medium change to 0.1% BSA basal medium, the cells are incubated with FGF-2 or agonists or antagonists of the invention with or without IL-1α for 24 hours. The supernatants are collected and assayed for PGE₂ by EIA kit (Cayman, Ann Arbor, Mich.). For the IL-6 assays, the human lung fibroblasts are cultured at 5,000 cells/well in a 96-well plate for one day. After a medium change to 0.1% BSA basal medium, the cells are incubated with FGF-2 or with or without agonists or antagonists of the invention IL-1α for 24 hours. The supernatants are collected and assayed for IL-6 by ELISA kit (Endogen, Cambridge, Mass.).

[1077] Human lung fibroblasts are cultured with FGF-2 or agonists or antagonists of the invention for 3 days in basal medium before the addition of Alamar Blue to assess effects on growth of the fibroblasts. FGF-2 should show a stimulation at 10 -2500 ng/ml which can be used to compare stimulation with agonists or antagonists of the invention.

### Parkinson Models

[1078] The loss of motor function in Parkinson's disease is attributed to a deficiency of striatal dopamine resulting from the degeneration of the nigrostriatal dopaminergic projection neurons. An animal model for Parkinson's that has been extensively characterized involves the systemic administration of 1-methyl-4 phenyl 1,2,3,6-tetrahydropyridine (MPTP). In the CNS, MPTP is taken-up by astrocytes and catabolized by monoamine oxidase B to 1-methyl-4-phenyl pyridine (MPP⁺) and released. Subsequently, MPP⁺ is actively accumulated in dopaminergic neurons by the high-affinity reuptake transporter for dopamine. MPP⁺ is then concentrated in mitochondria by the electrochemical gradient and selectively inhibits nicotidamide adenine disphosphate: ubiquinone oxidoreductionase (complex I), thereby interfering with electron transport and eventually generating oxygen radicals.

[1079] It has been demonstrated in tissue culture paradigms that FGF-2 (basic FGF) has trophic activity towards nigral dopaminergic neurons (Ferrari et al., Dev. Biol. 1989). Recently, Dr. Unsicker's group has demonstrated that administering FGF-2 in gel foam implants in the striatum results in the near complete protection of nigral dopaminergic neurons from the toxicity associated with MPTP exposure (Otto and Unsicker, J. Neuroscience, 1990).

[1080] Based on the data with FGF-2, agonists or antagonists of the invention can be evaluated to determine whether it has an action similar to that of FGF-2 in enhancing dopaminergic neuronal survival in vitro and it can also be tested in vivo for protection of dopaminergic neurons in the striatum from the damage associated with MPTP treatment. The potential effect of an agonist or antagonist of the invention is first examined in vitro in a dopaminergic neuronal cell culture paradigm. The cultures are prepared by dissecting the midbrain floor plate from gestation day 14 Wistar rat embryos. The tissue is dissociated with trypsin and seeded at a density of 200,000 cells/cm² on polyorthinine-laminin coated glass coverslips. The cells are maintained in Dulbecco's Modified Eagle's medium and F12 medium containing hormonal supplements (Ni). The cultures are fixed with paraformaldehyde after 8 days in vitro and are processed for tyrosine hydroxylase, a specific marker for dopaminergic neurons, immunohistochemical staining. Dissociated cell cultures are prepared from embryonic rats. The culture medium is changed every third day and the factors are also added at that time.

[1081] Since the dopaminergic neurons are isolated from animals at gestation day 14, a developmental time which is past the stage when the dopaminergic precursor cells are proliferating, an increase in the number of tyrosine hydroxylase immunopositive neurons would represent an increase in the number of dopaminergic neurons surviving in vitro. Therefore, if an agonist or antagonist of the invention acts to prolong the survival of dopaminergic neurons, it would suggest that the agonist or antagonist may be involved in Parkinson's Disease.

[1082] The studies described in this example tested activity of agonists or antagonists of the invention. However, one skilled in the art could easily modify the exemplified studies to test the activity of polynucleotides or polypeptides of the invention (e.g., gene therapy).

### Example 25

### The Effect of Agonists or Antagonists of the Invention on the Growth of Vascular Endothelial Cells

[1083] On day 1, human umbilical vein endothelial cells (HUVEC) are seeded at 2-5×10⁴ cells/35 mm dish density in M199 medium containing 4% fetal bovine serum (FBS), 16 units/ml heparin, and 50 units/ml endothelial cell growth supplements (ECGS, Biotechnique, Inc.). On day 2, the medium is replaced with M199 containing 10% FBS, 8 units/ml heparin. An agonist or antagonist of the invention, and positive controls, such as VEGF and basic FGF (bFGF) are added, at varying concentrations. On days 4 and 6, the medium is replaced. On day 8, cell number is determined with a Coulter Counter.

[1084] An increase in the number of HUVEC cells indicates that the compound of the invention may proliferate vascular endothelial cells, while a decrease in the number of HUVEC cells indicates that the compound of the invention inhibits vascular endothelial cells.

[1085] The studies described in this example tested activity of a polypeptide of the invention. However, one skilled in the art could easily modify the exemplified studies to test the activity of polynucleotides (e.g., gene therapy), agonists, and/or antagonists of the invention.

### Example 26

### Rat Corneal Wound Healing Model

[1086] This animal model shows the effect of an agonist or antagonist of the invention on neovascularization. The experimental protocol includes: Making a 1-1.5 mm long incision from the center of cornea into the stromal layer. Inserting a spatula below the lip of the incision facing the outer corner of the eye. Making a pocket (its base is 1-1.5 mm form the edge of the eye). Positioning a pellet, containing 50 ng-5 ug of an agonist or antagonist of the invention, within the pocket.

[1087] Treatment with an agonist or antagonist of the invention can also be applied topically to the corneal wounds in a dosage range of 20 mg -500 mg (daily treatment for five days).

[1088] The studies described in this example tested activity of agonists or antagonists of the invention. However, one skilled in the art could easily modify the exemplified studies to test the activity of polynucleotides or polypeptides of the invention (e.g., gene therapy).

### Example 27

### Diabetic Mouse and Glucocorticoid-Impaired Wound Healing Models

### Diabetic db+/db+ Mouse Model

[1089] To demonstrate that an agonist or antagonist of the invention accelerates the healing process, the genetically diabetic mouse model of wound healing is used. The full thickness wound healing model in the db+/db+ mouse is a well characterized, clinically relevant and reproducible model of impaired wound healing. Healing of the diabetic wound is dependent on formation of granulation tissue and re-epithelialization rather than contraction (Gartner, M. H. et al., J. Surg. Res. 52:389 (1992); Greenhalgh, D. G. et al., Am. J. Pathol. 136:1235 (1990)).

[1090] The diabetic animals have many of the characteristic features observed in Type II diabetes mellitus. Homozygous (db+/db+) mice are obese in comparison to their normal heterozygous (db+/+ m) littermates. Mutant diabetic (db+/db+) mice have a single autosomal recessive mutation on chromosome 4 (db+) (Coleman et al. Proc. Natl. Acad. Sci. USA 77:283-293 (1982)). Animals show polyphagia, polydipsia and polyuria. Mutant diabetic mice (db+/db+) have elevated blood glucose, increased or normal insulin levels, and suppressed cell-mediated immunity (Mandel et al., J. Immunol. 120:1375 (1978); Debray-Sachs, M. et al., Clin. Exp. Immunol. 51(1):1-7 (1983); Leiter et al., Am. J. of Pathol. 114:46-55 (1985)). Peripheral neuropathy, myocardial complications, and microvascular lesions, basement membrane thickening and glomerular filtration abnormalities have been described in these animals (Norido, F. et al., Exp. Neurol. 83(2):221-232 (1984); Robertson et al., Diabetes 29(1):60-67 (1980); Giacomelli et Lab Invest. 40(4):460-473 (1979); Coleman, D. L., Diabetes 31 (Suppl):1-6 (1982)). These homozygous diabetic mice develop hyperglycemia that is resistant to insulin analogous to human type II diabetes (Mandel et al., J. Immunol. 120:1375-1377 (1978)).

[1091] The characteristics observed in these animals suggests that healing in this model may be similar to the healing observed in human diabetes (Greenhalgh, et al., Am. J. of Pathol. 136:1235-1246 (1990)).

[1092] Genetically diabetic female C57BL/KsJ (db+/db+) mice and their non-diabetic (db+/+m) heterozygous littermates are used in this study (Jackson Laboratories). The animals are purchased at 6 weeks of age and are 8 weeks old at the beginning of the study. Animals are individually housed and received food and water ad libitum. All manipulations are performed using aseptic techniques. The experiments are conducted according to the rules and guidelines of Human Genome Sciences, Inc. Institutional Animal Care and Use Committee and the Guidelines for the Care and Use of Laboratory Animals.

[1093] Wounding protocol is performed according to previously reported methods (Tsuboi, R. and Rifkin, D. B., J. Exp. Med. 172:245-251 (1990)). Briefly, on the day of wounding, animals are anesthetized with an intraperitoneal injection of Avertin (0.01 mg/mL), 2,2,2-tribromoethanol and 2-methyl-2-butanol dissolved in deionized water. The dorsal region of the animal is shaved and the skin washed with 70% ethanol solution and iodine. The surgical area is dried with sterile gauze prior to wounding. An 8 mm full-thickness wound is then created using a Keyes tissue punch. Immediately following wounding, the surrounding skin is gently stretched to eliminate wound expansion. The wounds are left open for the duration of the experiment. Application of the treatment is given topically for 5 consecutive days commencing on the day of wounding. Prior to treatment, wounds are gently cleansed with sterile saline and gauze sponges.

[1094] Wounds are visually examined and photographed at a fixed distance at the day of surgery and at two day intervals thereafter. Wound closure is determined by daily measurement on days 1-5 and on day 8. Wounds are measured horizontally and vertically using a calibrated Jameson caliper. Wounds are considered healed if granulation tissue is no longer visible and the wound is covered by a continuous epithelium.

[1095] An agonist or antagonist of the invention is administered using at a range different doses, from 4 mg to 500 mg per wound per day for 8 days in vehicle. Vehicle control groups received 50 mL of vehicle solution.

[1096] Animals are euthanized on day 8 with an intraperitoneal injection of sodium pentobarbital (300 mg/kg). The wounds and surrounding skin are then harvested for histology and immunohistochemistry. Tissue specimens are placed in 10% neutral buffered formalin in tissue cassettes between biopsy sponges for further processing.

[1097] Three groups of 10 animals each (5 diabetic and 5 non-diabetic controls) are evaluated: 1) Vehicle placebo control, 2) untreated group, and 3) treated group.

[1098] Wound closure is analyzed by measuring the area in the vertical and horizontal axis and obtaining the total square area of the wound. Contraction is then estimated by establishing the differences between the initial wound area (day 0) and that of post treatment (day 8). The wound area on day 1 is 64 mm², the corresponding size of the dermal punch. Calculations are made using the following formula:

[Open area on day 8]−[Open area on day 1]/[Open area on day 1]

[1099] Specimens are fixed in 10% buffered formalin and paraffin embedded blocks are sectioned perpendicular to the wound surface (5 mm) and cut using a Reichert-Jung micorotome. Routine hematoxylin-eosin (H&E) staining is performed on cross-sections of bisected wounds. Histologic examination of the wounds are used to assess whether the healing process and the morphologic appearance of the repaired skin is altered by treatment with an agonist or antagonist of the invention. This assessment included verification of the presence of cell accumulation, inflammatory cells, capillaries, fibroblasts, re-epithelialization and epidermal maturity (Greenhalgh, D. G. et al., Am. J Pathol. 136:1235 (1990)). A calibrated lens micrometer is used by a blinded observer.

[1100] Tissue sections are also stained immunohistochemically with a polyclonal rabbit anti-human keratin antibody using ABC Elite detection system. Human skin is used as a positive tissue control while non-immune IgG is used as a negative control. Keratinocyte growth is determined by evaluating the extent of reepithelialization of the wound using a calibrated lens micrometer.

[1101] Proliferating cell nuclear antigen/cyclin (PCNA) in skin specimens is demonstrated by using anti-PCNA antibody (1:50) with an ABC Elite detection system. Human colon cancer served as a positive tissue control and human brain tissue is used as a negative tissue control. Each specimen included a section with omission of the primary antibody and substitution with non-immune mouse IgG. Ranking of these sections is based on the extent of proliferation on a scale of 0-8, the lower side of the scale reflecting slight proliferation to the higher side reflecting intense proliferation.

[1102] Experimental data are analyzed using an unpaired t test. A p value of <0.05 is considered significant.

### Steroid Impaired Rat Model

[1103] The inhibition of wound healing by steroids has been well documented in various in vitro and in vivo systems (Wahl, Glucocorticoids and Wound healing. In: Anti-Inflammatory Steroid Action: Basic and Clinical Aspects. 280-302 (1989); Wahlet al., J. Immunol. 115: 476-481 (1975); Werb et al., J. Exp. Med. 147:1684-1694 (1978)). Glucocorticoids retard wound healing by inhibiting angiogenesis, decreasing vascular permeability (Ebert et al., An. Intern. Med. 37:701-705 (1952)), fibroblast proliferation, and collagen synthesis (Beck et al., Growth Factors. 5: 295-304 (1991); Haynes et al., J. Clin. Invest. 61: 703-797 (1978)) and producing a transient reduction of circulating monocytes (Haynes et al., J. Clin. Invest. 61: 703-797 (1978); Wahl, “Glucocorticoids and wound healing”, In: Antiinflammatory Steroid Action: Basic and Clinical Aspects, Academic Press, New York, pp. 280-302 (1989)). The systemic administration of steroids to impaired wound healing is a well establish phenomenon in rats (Beck et al., Growth Factors. 5: 295-304 (1991); Haynes et al., J. Clin. Invest. 61: 703-797 (1978); Wahl, “Glucocorticoids and wound healing”, In: Antiinflammatory Steroid Action: Basic and Clinical Aspects, Academic Press, New York, pp. 280-302 (1989); Pierce et al., Proc. Natl. Acad. Sci. USA 86: 2229-2233 (1989)).

[1104] To demonstrate that an agonist or antagonist of the invention can accelerate the healing process, the effects of multiple topical applications of the agonist or antagonist on full thickness excisional skin wounds in rats in which healing has been impaired by the systemic administration of methylprednisolone is assessed.

[1105] Young adult male Sprague Dawley rats weighing 250-300 g (Charles River Laboratories) are used in this example. The animals are purchased at 8 weeks of age and are 9 weeks old at the beginning of the study. The healing response of rats is impaired by the systemic administration of methylprednisolone (17 mg/kg/rat intramuscularly) at the time of wounding. Animals are individually housed and received food and water ad libitum. All manipulations are performed using aseptic techniques. This study is conducted according to the rules and guidelines of Human Genome Sciences, Inc. Instiutional Animal Care and Use Committee and the Guidelines for the Care and Use of Laboratory Animals.

[1106] The wounding protocol is followed according to section A, above. On the day of wounding, animals are anesthetized with an intramuscular injection of ketamine (50 mg/kg) and xylazine (5 mg/kg). The dorsal region of the animal is shaved and the skin washed with 70% ethanol and iodine solutions. The surgical area is dried with sterile gauze prior to wounding. An 8 mm full-thickness wound is created using a Keyes tissue punch. The wounds are left open for the duration of the experiment. Applications of the testing materials are given topically once a day for 7 consecutive days commencing on the day of wounding and subsequent to methylprednisolone administration. Prior to treatment, wounds are gently cleansed with sterile saline and gauze sponges.

[1107] Wounds are visually examined and photographed at a fixed distance at the day of wounding and at the end of treatment. Wound closure is determined by daily measurement on days 1-5 and on day 8. Wounds are measured horizontally and vertically using a calibrated Jameson caliper. Wounds are considered healed if granulation tissue is no longer visible and the wound is covered by a continuous epithelium.

[1108] The agonist or antagonist of the invention is administered using at a range different doses, from 4 mg to 500 mg per wound per day for 8 days in vehicle. Vehicle control groups received 50 mL of vehicle solution.

[1109] Animals are euthanized on day 8 with an intraperitoneal injection of sodium pentobarbital (300 mg/kg). The wounds and surrounding skin are then harvested for histology. Tissue specimens are placed in 10% neutral buffered formalin in tissue cassettes between biopsy sponges for further processing.

[1110] Three groups of 10 animals each (5 with methylprednisolone and 5 without glucorticoid) are evaluated: 1) Untreated group 2) Vehicle placebo control 3) treated groups.

[1111] Wound closure is analyzed by measuring the area in the vertical and horizontal axis and obtaining the total area of the wound. Closure is then estimated by establishing the differences between the initial wound area (day 0) and that of post treatment (day 8). The wound area on day 1 is 64 mm², the corresponding size of the dermal punch. Calculations are made using the following formula:

[Open area on day 8]−[Open area on day 1]/[Open area on day 1]

[1112] Specimens are fixed in 10% buffered formalin and paraffin embedded blocks are sectioned perpendicular to the wound surface (5 mm) and cut using an Olympus microtome. Routine hematoxylin-eosin (H&E) staining is performed on cross-sections of bisected wounds. Histologic examination of the wounds allows assessment of whether the healing process and the morphologic appearance of the repaired skin is improved by treatment with an agonist or antagonist of the invention. A calibrated lens micrometer is used by a blinded observer to determine the distance of the wound gap.

[1113] Experimental data are analyzed using an unpaired t test. A p value of <0.05 is considered significant.

[1114] The studies described in this example tested activity of agonists or antagonists of the invention. However, one skilled in the art could easily modify the exemplified studies to test the activity of polynucleotides or polypeptides of the invention (e.g., gene therapy).

### Example 28

### Lymphadema Animal Model

[1115] The purpose of this experimental approach is to create an appropriate and consistent lymphedema model for testing the therapeutic effects of an agonist or antagonist of the invention in lymphangiogenesis and re-establishment of the lymphatic circulatory system in the rat hind limb. Effectiveness is measured by swelling volume of the affected limb, quantification of the amount of lymphatic vasculature, total blood plasma protein, and histopathology. Acute lymphedema is observed for 7-10 days. Perhaps more importantly, the chronic progress of the edema is followed for up to 3-4 weeks.

[1116] Prior to beginning surgery, blood sample is drawn for protein concentration analysis. Male rats weighing approximately ˜350 g are dosed with Pentobarbital. Subsequently, the right legs are shaved from knee to hip. The shaved area is swabbed with gauze soaked in 70% EtOH. Blood is drawn for serum total protein testing. Circumference and volumetric measurements are made prior to injecting dye into paws after marking 2 measurement levels (0.5 cm above heel, at mid-pt of dorsal paw). The intradermal dorsum of both right and left paws are injected with 0.05 ml of 1% Evan's Blue. Circumference and volumetric measurements are then made following injection of dye into paws.

[1117] Using the knee joint as a landmark, a mid-leg inguinal incision is made circumferentially allowing the femoral vessels to be located. Forceps and hemostats are used to dissect and separate the skin flaps. After locating the femoral vessels, the lymphatic vessel that runs along side and underneath the vessel(s) is located. The main lymphatic vessels in this area are then electrically coagulated or suture ligated.

[1118] Using a microscope, muscles in back of the leg (near the semitendinosis and adductors) are bluntly dissected. The popliteal lymph node is then located. The 2 proximal and 2 distal lymphatic vessels and distal blood supply of the popliteal node are then ligated by suturing. The popliteal lymph node, and any accompanying adipose tissue, is then removed by cutting connective tissues.

[1119] Care is taken to control any mild bleeding resulting from this procedure. After lymphatics are occluded, the skin flaps are sealed by using liquid skin (Vetbond) (AJ Buck. The separated skin edges are sealed to the underlying muscle tissue while leaving a gap of ˜0.5 cm around the leg. Skin also may be anchored by suturing to underlying muscle when necessary.

[1120] To avoid infection, animals are housed individually with mesh (no bedding). Recovering animals are checked daily through the optimal edematous peak, which typically occurred by day 5-7. The plateau edematous peak are then observed. To evaluate the intensity of the lymphedema, the circumference and volumes of 2 designated places on each paw before operation and daily for 7 days are measured. The effect of plasma proteins on lymphedema is determined and whether protein analysis is a useful testing perimeter is also investigated. The weights of both control and edematous limbs are evaluated at 2 places. Analysis is performed in a blind manner.

[1121] Circumference Measurements: Under brief gas anesthetic to prevent limb movement, a cloth tape is used to measure limb circumference. Measurements are done at the ankle bone and dorsal paw by 2 different people and those 2 readings are averaged. Readings are taken from both control and edematous limbs.

[1122] Volumetric Measurements: On the day of surgery, animals are anesthetized with Pentobarbital and are tested prior to surgery. For daily volumetrics animals are under brief halothane anesthetic (rapid immobilization and quick recovery), and both legs are shaved and equally marked using waterproof marker on legs. Legs are first dipped in water, then dipped into instrument to each marked level, then measured by Buxco edema software(Chen/Victor). Data is recorded by one person, while the other is dipping the limb to marked area.

[1123] Blood-plasma protein measurements: Blood is drawn, spun, and serum separated prior to surgery and then at conclusion for total protein and Ca2+ comparison.

[1124] Limb Weight Comparison: After drawing blood, the animal is prepared for tissue collection. The limbs are amputated using a quillitine, then both experimental and control legs are cut at the ligature and weighed. A second weighing is done as the tibio-cacaneal joint is disarticulated and the foot is weighed.

[1125] Histological Preparations: The transverse muscle located behind the knee (popliteal) area is dissected and arranged in a metal mold, filled with freezeGel, dipped into cold methylbutane, placed into labeled sample bags at −80 EC until sectioning. Upon sectioning, the muscle is observed under fluorescent microscopy for lymphatics.

[1126] The studies described in this example tested activity of agonists or antagonists of the invention. However, one skilled in the art could easily modify the exemplified studies to test the activity of polynucleotides or polypeptides of the invention (e.g., gene therapy).

### Example 29

### Suppression of TNF Alpha-induced Adhesion Molecule Expression by a Agonist or Antagonist of the Invention

[1127] The recruitment of lymphocytes to areas of inflammation and angiogenesis involves specific receptor-ligand interactions between cell surface adhesion molecules (CAMs) on lymphocytes and the vascular endothelium. The adhesion process, in both normal and pathological settings, follows a multi-step cascade that involves intercellular adhesion molecule-1 (ICAM-1), vascular cell adhesion molecule-1 (VCAM-1), and endothelial leukocyte adhesion molecule-1 (E-selectin) expression on endothelial cells (EC). The expression of these molecules and others on the vascular endothelium determines the efficiency with which leukocytes may adhere to the local vasculature and extravasate into the local tissue during the development of an inflammatory response. The local concentration of cytokines and growth factor participate in the modulation of the expression of these CAMs.

[1128] Tumor necrosis factor alpha (TNF-a), a potent proinflammatory cytokine, is a stimulator of all three CAMs on endothelial cells and may be involved in a wide variety of inflammatory responses, often resulting in a pathological outcome.

[1129] The potential of an agonist or antagonist of the invention to mediate a suppression of TNF-a induced CAM expression can be examined. A modified ELISA assay which uses ECs as a solid phase absorbent is employed to measure the amount of CAM expression on TNF-a treated ECs when co-stimulated with a member of the FGF family of proteins.

[1130] To perform the experiment, human umbilical vein endothelial cell (HUVEC) cultures are obtained from pooled cord harvests and maintained in growth medium (EGM-2; Clonetics, San Diego, Calif.) supplemented with 10% FCS and 1% penicillin/streptomycin in a 37 degree C. humidified incubator containing 5% CO₂. HUVECs are seeded in 96-well plates at concentrations of 1×10⁴ cells/well in EGM medium at 37 degree C. for 18-24 hrs or until confluent. The monolayers are subsequently washed 3 times with a serum-free solution of RPMI-1640 supplemented with 100 U/ml penicillin and 100 mg/ml streptomycin, and treated with a given cytokine and/or growth factor(s) for 24 h at 37 degree C. Following incubation, the cells are then evaluated for CAM expression.

[1131] Human Umbilical Vein Endothelial cells (HUVECs) are grown in a standard 96 well plate to confluence. Growth medium is removed from the cells and replaced with 90 ul of 199 Medium (10% FBS). Samples for testing and positive or negative controls are added to the plate in triplicate (in 10 ul volumes). Plates are incubated at 37 degree C. for either 5 h (selectin and integrin expression) or 24 h (integrin expression only). Plates are aspirated to remove medium and 100 μl of 0.1% paraformaldehyde-PBS(with Ca++ and Mg++) is added to each well. Plates are held at 4° C. for 30 min.

[1132] Fixative is then removed from the wells and wells are washed 1× with PBS(+Ca,Mg)+0.5% BSA and drained. Do not allow the wells to dry. Add 10 μl of diluted primary antibody to the test and control wells. Anti-ICAM-1-Biotin, Anti-VCAM-1-Biotin and Anti-E-selectin-Biotin are used at a concentration of 10 μg/ml (1:10 dilution of 0.1 mg/ml stock antibody). Cells are incubated at 37° C. for 30 min. in a humidified environment. Wells are washed ×3 with PBS(+Ca,Mg)+0.5% BSA.

[1133] Then add 20 μl of diluted ExtrAvidin-Alkaline Phosphotase (1:5,000 dilution) to each well and incubated at 37° C. for 30 min. Wells are washed ×3 with PBS(+Ca,Mg)+0.5% BSA. 1 tablet of p-Nitrophenol Phosphate pNPP is dissolved in 5 ml of glycine buffer (pH 10.4). 100 μl of pNPP substrate in glycine buffer is added to each test well. Standard wells in triplicate are prepared from the working dilution of the ExtrAvidin-Alkaline Phosphotase in glycine buffer: 1:5,000 (10⁰)>10^{-0.5}>10−1>10^{-1.5}0.5 μl of each dilution is added to triplicate wells and the resulting AP content in each well is 5.50 ng, 1.74 ng, 0.55 ng, 0.18 ng. 100 μl of pNNP reagent must then be added to each of the standard wells. The plate must be incubated at 37° C. for 4h. A volume of 50 μl of 3M NaOH is added to all wells. The results are quantified on a plate reader at 405 nm. The background subtraction option is used on blank wells filled with glycine buffer only. The template is set up to indicate the concentration of AP-conjugate in each standard well [5.50 ng; 1.74 ng; 0.55 ng; 0.18 ng]. Results are indicated as amount of bound AP-conjugate in each sample.

[1134] The studies described in this example tested activity of agonists or antagonists of the invention. However, one skilled in the art could easily modify the exemplified studies to test the activity of polynucleotides or polypeptides of the invention (e.g., gene therapy).

### Example 30

### Production of Polypeptide of the Invention for High-Throughput Screening Assays

[1135] The following protocol produces a supernatant containing polypeptide of the present invention to be tested. This supernatant can then be used in the Screening Assays described in Examples 32-41.

[1136] First, dilute Poly-D-Lysine (644 587 Boehringer-Mannheim) stock solution (1 mg/ml in PBS) 1:20 in PBS (w/o calcium or magnesium 17-516F Biowhittaker) for a working solution of 50 ug/ml. Add 200 ul of this solution to each well (24 well plates) and incubate at RT for 20 minutes. Be sure to distribute the solution over each well (note: a 12-channel pipetter may be used with tips on every other channel). Aspirate off the Poly-D-Lysine solution and rinse with 1ml PBS (Phosphate Buffered Saline). The PBS should remain in the well until just prior to plating the cells and plates may be poly-lysine coated in advance for up to two weeks.

[1137] Plate 293T cells (do not carry cells past P+20) at 2×10⁵ cells/well in 0.5 ml DMEM(Dulbecco's Modified Eagle Medium)(with 4.5 G/L glucose and L-glutamine (12-604F Biowhittaker))/10% heat inactivated FBS(14-503F Biowhittaker)/1× Penstrep(17-602E Biowhittaker). Let the cells grow overnight.

[1138] The next day, mix together in a sterile solution basin: 300 ul Lipofectamine (18324-012 Gibco/BRL) and 5 ml Optimem 1 (31985070 Gibco/BRL)/96-well plate. With a small volume multi-channel pipetter, aliquot approximately 2 ug of an expression vector containing a polynucleotide insert, produced by the methods described in Examples 8-10, into an appropriately labeled 96-well round bottom plate. with a multi-channel pipetter, add 50ul of the Lipofectamine/Optimem I mixture to each well. Pipette up and down gently to mix. Incubate at RT 15-45 minutes. After about 20 minutes, use a multi-channel pipetter to add 150 ul Optimem I to each well. As a control, one plate of vector DNA lacking an insert should be transfected with each set of transfections.

[1139] Preferably, the transfection should be performed by tag-teaming the following tasks. By tag-teaming, hands on time is cut in half, and the cells do not spend too much time on PBS. First, person A aspirates off the media from four 24-well plates of cells, and then person B rinses each well with 0.5-1 ml PBS. Person A then aspirates off PBS rinse, and person B, using a12-channel pipetter with tips on every other channel, adds the 200 ul of DNA/Lipofectamine/Optimem I complex to the odd wells first, then to the even wells, to each row on the 24-well plates. Incubate at 37 degree C. for 6 hours.

[1140] While cells are incubating, prepare appropriate media, either 1%BSA in DMEM with 1×penstrep, or HGS CHO-5 media (116.6 mg/L of CaCl2 (anhyd); 0.00130 mg/L CuSO₄-5H₂O; 0.050 mg/L of Fe(NO₃)₃-9H₂O; 0.417 mg/L of FeSO₄-7H₂O; 311.80 mg/L of Kcl; 28.64 mg/L of MgCl₂; 48.84 mg/L of MgSO₄; 6995.50 mg/L of NaCl; 2400.0 mg/L of NaHCO₃; 62.50 mg/L of NaH₂PO₄-H₂O; 71.02 mg/L of Na₂HPO4; 0.4320 mg/L of ZnSO₄-7H₂O; 0.002 mg/L of Arachidonic Acid ; 1.022 mg/L of Cholesterol; 0.070 mg/L of DL-alpha-Tocopherol-Acetate; 0.0520 mg/L of Linoleic Acid; 0.010 mg/L of Linolenic Acid; 0.010 mg/L of Myristic Acid; 0.010 mg/L of Oleic Acid; 0.010 mg/L of Palmitric Acid; 0.010 mg/L of Palmitic Acid; 100 mg/L of Pluronic F-68; 0.010 mg/L of Stearic Acid; 2.20 mg/L of Tween 80; 4551 mg/L of D-Glucose; 130.85 mg/ml of L- Alanine; 147.50 mg/ml of L-Arginine-HCL; 7.50 mg/ml of L-Asparagine-H₂O; 6.65 mg/ml of L-Aspartic Acid; 29.56 mg/ml of L-Cystine-2HCL-H₂O; 31.29 mg/ml of L-Cystine-2HCL; 7.35 mg/ml of L-Glutamic Acid; 365.0 mg/ml of L-Glutamine; 18.75 mg/ml of Glycine; 52.48 mg/ml of L-Histidine-HCL-H₂O; 106.97 mg/ml of L-Isoleucine; 111.45 mg/ml of L-Leucine; 163.75 mg/ml of L-Lysine HCL; 32.34 mg/ml of L-Methionine; 68.48 mg/ml of L-Phenylalainine; 40.0 mg/ml of L-Proline; 26.25 mg/ml of L-Serine; 101.05 mg/ml of L-Threonine; 19.22 mg/ml of L-Tryptophan; 91.79 mg/ml of L-Tryrosine-2Na-2H₂O; and 99.65 mg/ml of L-Valine; 0.0035 mg/L of Biotin; 3.24 mg/L of D-Ca Pantothenate; 11.78 mg/L of Choline Chloride; 4.65 mg/L of Folic Acid; 15.60 mg/L of i-Inositol; 3.02 mg/L of Niacinamide; 3.00 mg/L of Pyridoxal HCL; 0.031 mg/L of Pyridoxine HCL; 0.319 mg/L of Riboflavin; 3.17 mg/L of Thiamine HCL; 0.365 mg/L of Thymidine; 0.680 mg/L of Vitamin B₁₂; 25 mM of HEPES Buffer; 2.39 mg/L of Na Hypoxanthine; 0.105 mg/L of Lipoic Acid; 0.081 mg/L of Sodium Putrescine-2HCL; 55.0 mg/L of Sodium Pyruvate; 0.0067 mg/L of Sodium Selenite; 20 uM of Ethanolamine; 0.122 mg/L of Ferric Citrate; 41.70 mg/L of Methyl-B-Cyclodextrin complexed with Linoleic Acid; 33.33 mg/L of Methyl-B-Cyclodextrin complexed with Oleic Acid; 10 mg/L of Methyl-B-Cyclodextrin complexed with Retinal Acetate. Adjust osmolarity to 327 mOsm) with 2 mm glutamine and 1×penstrep. (BSA (81-068-3 Bayer) 100 gm dissolved in IL DMEM for a 10% BSA stock solution). Filter the media and collect 50 ul for endotoxin assay in 15 ml polystyrene conical.

[1141] The transfection reaction is terminated, preferably by tag-teaming, at the end of the incubation period. Person A aspirates off the transfection media, while person B adds 1.5 ml appropriate media to each well. Incubate at 37 degree C. for 45 or 72 hours depending on the media used: 1%BSA for 45 hours or CHO-5 for 72 hours.

[1142] On day four, using a 300 ul multichannel pipetter, aliquot 600 ul in one 1 ml deep well plate and the remaining supernatant into a 2 ml deep well. The supernatants from each well can then be used in the assays described in Examples 32-39.

[1143] It is specifically understood that when activity is obtained in any of the assays described below using a supernatant, the activity originates from either the polypeptide of the present invention directly (e.g., as a secreted protein) or by polypeptide of the present invention inducing expression of other proteins, which are then secreted into the supernatant. Thus, the invention further provides a method of identifying the protein in the supernatant characterized by an activity in a particular assay.

### Example 31

### Construction of GAS Reporter Construct

[1144] One signal transduction pathway involved in the differentiation and proliferation of cells is called the Jaks-STATs pathway. Activated proteins in the Jaks-STATs pathway bind to gamma activation site “GAS” elements or interferon-sensitive responsive element (“ISRE”), located in the promoter of many genes. The binding of a protein to these elements alter the expression of the associated gene.

[1145] GAS and ISRE elements are recognized by a class of transcription factors called Signal Transducers and Activators of Transcription, or “STATs.” There are six members' of the STATs family. Stat1 and Stat3 are present in many cell types, as is Stat2 (as response to IFN-alpha is widespread). Stat4 is more restricted and is not in many cell types though it has been found in T helper class I, cells after treatment with IL-12. Stat5 was originally called mammary growth factor, but has been found at higher concentrations in other cells including myeloid cells. It can be activated in tissue culture cells by many cytokines.

[1146] The STATs are activated to translocate from the cytoplasm to the nucleus upon tyrosine phosphorylation by a set of kinases known as the Janus Kinase (“Jaks”) family. Jaks represent a distinct family of soluble tyrosine kinases and include Tyk2, Jak1, Jak2, and Jak3. These kinases display significant sequence similarity and are generally catalytically inactive in resting cells.

[1147] The Jaks are activated by a wide range of receptors summarized in the Table below. (Adapted from review by Schidler and Darnell, Ann. Rev. Biochem. 64:621-51 (1995).) A cytokine receptor family, capable of activating Jaks, is divided into two groups: (a) Class 1 includes receptors for IL-2, IL-3, IL-4, IL-6, IL-7, IL-9, IL-11, IL-12, IL-15, Epo, PRL, GH, G-CSF, GM-CSF, LIF, CNTF, and thrombopoietin; and (b) Class 2 includes IFN-a, IFN-g, and IL-10. The Class 1 receptors share a conserved cysteine motif (a set of four conserved cysteines and one tryptophan) and a WSXWS motif (a membrane proximal region encoding Trp-Ser-Xaa-Trp-Ser (SEQ ID NO:2)).

[1148] Thus, on binding of a ligand to a receptor, Jaks are activated, which in turn activate STATs, which then translocate and bind to GAS elements. This entire process is encompassed in the Jaks-STATs signal transduction pathway.

[1149] Therefore, activation of the Jaks-STATs pathway, reflected by the binding of the GAS or the ISRE element, can be used to indicate proteins involved in the proliferation and differentiation of cells. For example, growth factors and cytokines are known to activate the Jaks-STATs pathway. (See Table below.) Thus, by using GAS elements linked to reporter molecules, activators of the Jaks-STATs pathway can be identified.

| JAKs | STATS | GAS(elements) or ISRE | | | | |
|---|---|---|---|---|---|---|
| Ligand | tyk2 | Jak1 | Jak2 | Jak3 | | |
| IFN family | | | | | | |
| IFN-a/B + | + | − | − | 1,2,3 | | ISRE |
| IFN-g | | + | + | − | 1 | GAS |
| | | | | | | (IRF1 > |
| | | | | | | Lys6 > IFP) |
| Il-10 | + | ? | ? | − | 1,3 | |
| gp 130 family | | | | | | |
| IL-6 | + | + | ? | 1,3 | | GAS |
| (Pleiotropic) + | | | | | | (IRF1 > |
| | | | | | | Lys6 > IFP) |
| Il-11 | + | ? | ? | 1,3 | | |
| (Pleiotropic) ? | | | | | | |
| OnM | + | + | ? | 1,3 | | |
| (Pleiotropic) ? | | | | | | |
| LIF | + | + | ? | 1,3 | | |
| (Pleiotropic) 48 | | | | | | |
| CNTF | −/+ | + | + | ? | 1,3 | |
| (Pleiotropic) | | | | | | |
| G-CSF | ? | + | ? | ? | 1,3 | |
| (Pleiotropic) | | | | | | |
| IL-12 | + | − | + | + | 1,3 | |
| (Pleiotropic) | | | | | | |
| g-C family | | | | | | |
| IL-2 | − | + | − | + | 1,3,5 | GAS |
| (lymphocytes) | | | | | | |
| IL-4 (lymph/ | − | + | − | + | 6 | GAS |
| myeloid) | | | | | | (IRFI = |
| | | | | | | IFP >> |
| | | | | | | Ly6)(IgH) |
| IL-7 | − | + | − | + | 5 | GAS |
| (lymphocytes) | | | | | | |
| IL-9 | − | + | − | + | 5 | GAS |
| (lymphocytes) | | | | | | |
| IL-13 | − | + | ? | ? | 6 | GAS |
| (lymphocyte) | | | | | | |
| IL-15 | ? | + | ? | + | 5 | GAS |
| gp 140 family | | | | | | |
| IL-3 (myeloid) | − | − | + | − | 5 | GAS |
| | | | | | | (IRF1 > |
| | | | | | | IFP >> Ly6) |
| IL-5 (myeloid) | − | − | + | − | 5 | GAS |
| GM-CSF | − | − | + | − | 5 | GAS |
| (myeloid) | | | | | | |
| Growth hormone | | | | | | |
| family | | | | | | |
| GH | ? | − | + | − | 5 | |
| PRL | ? | +/− | + | − | 1,3,5 | |
| EPO | ? | − | + | − | 5 | GAS |
| | | | | | | (B-CAS > |
| | | | | | | IRF1 = |
| | | | | | | IFP >> Ly6) |
| Receptor | | | | | | |
| Tyrosine Kinases | | | | | | |
| EGF | ? | + | + | − | 1,3 | GAS |
| | | | | | | (IRF1) |
| PDGF | ?+ | + | − | 1,3 | | |
| CSF-1 | ? | + | + | − | 1,3 | GAS |
| | | | | | | (not IRF1) |

[1150] To construct a synthetic GAS containing promoter element, which is used in the Biological Assays described in Examples 32-33, a PCR based strategy is employed to generate a GAS-SV40 promoter sequence. The 5′ primer contains four tandem copies of the GAS binding site found in the IRF1 promoter and previously demonstrated to bind STATs upon induction with a range of cytokines (Rothman et al., Immunity 1:457-468 (1994).), although other GAS or ISRE elements can be used instead. The 5′ primer also contains 18 bp of sequence complementary to the SV40 early promoter sequence and is flanked with an XhoI site. The sequence of the 5′ primer is:

| | |
|---|---|
| 5′:GCGCCTCGAGATTTCCCCGAAATCTAGATTTCCCCGAAATGATTTCCCCGAAAT | (SEQ ID NO: 3) |
| GATTTCCCCGAAATATCTGCCATCTCAATTAG:3′ | |

[1151] The downstream primer is complementary to the SV40 promoter and is flanked with a Hind III site: 5′:GCGGCAAGCTTTTTGCAAAGCCTAGGC:3′ (SEQ ID NO:4)

[1152] PCR amplification is performed using the SV40 promoter template present in the B-gal:promoter plasmid obtained from Clontech. The resulting PCR fragment is digested with XhoI/Hind III and subcloned into BLSK2-. (Stratagene.) Sequencing with forward and reverse primers confirms that the insert contains the following sequence:

| | |
|---|---|
| 5′:CTCGAGATTTCCCCGAAATCTAGATTTCCCCGAAATGATTTCCCCGAAATGATT | (SEQ ID NO: 5) |
| TCCCCGAAATATCTGCCATCTCAATTAGTCAGCAACCATAGTCCCGCCCCTAACT | |
| CCGCCCATCCCGCCCCTAACTCCGCCCAGTTCCGCCCATTCTCCGCCCCATGGCTG | |
| ACTAATTTTTTTTATTTATGCAGAGGCCGAGGCCGCCTCGGCCTCTGAGCTATTCC | |
| AGAAGTAGTGAGGAGGCTTTTTTGGAGGCCTAGGCTTTTGCAAAAAGCTT:3′ | |

[1153] With this GAS promoter element linked to the SV40 promoter, a GAS:SEAP2 reporter construct is next engineered. Here, the reporter molecule is a secreted alkaline phosphatase, or “SEAP.” Clearly, however, any reporter molecule can be used instead of SEAP, in this or in any of the other Examples. Well known reporter molecules that can be used instead of SEAP include chloramphenicol acetyltransferase (CAT), luciferase, alkaline phosphatase, B-galactosidase, green fluorescent protein (GFP), or any protein detectable by an antibody.

[1154] The above sequence confirmed synthetic GAS-SV40 promoter element is subcloned into the pSEAP-Promoter vector obtained from Clontech using HindIII and XhoI, effectively replacing the SV40 promoter with the amplified GAS:SV40 promoter element, to create the GAS-SEAP vector. However, this vector does not contain a neomycin resistance gene, and therefore, is not preferred for mammalian expression systems.

[1155] Thus, in order to generate mammalian stable cell lines expressing the GAS-SEAP reporter, the GAS-SEAP cassette is removed from the GAS-SEAP vector using SalI and NotI, and inserted into a backbone vector containing the neomycin resistance gene, such as pGFP-1 (Clontech), using these restriction sites in the multiple cloning site, to create the GAS-SEAP/Neo vector. Once this vector is transfected into mammalian cells, this vector can then be used as a reporter molecule for GAS binding as described in Examples 32-33.

[1156] Other constructs can be made using the above description and replacing GAS with a different promoter sequence. For example, construction of reporter molecules containing NFK-B and EGR promoter sequences are described in Examples 34 and 35. However, many other promoters can be substituted using the protocols described in these Examples. For instance, SRE, IL-2, NFAT, or Osteocalcin promoters can be substituted, alone or in combination (e.g., GAS/NF-KB/EGR, GAS/NF-KB, Il-2/NFAT, or NF-KB/GAS). Similarly, other cell lines can be used to test reporter construct activity, such as HELA (epithelial), HUVEC (endothelial), Reh (B-cell), Saos-2 (osteoblast), HUVAC (aortic), or Cardiomyocyte.

### Example 32

### High-Throughput Screening Assay for T-cell Activity

[1157] The following protocol is used to assess T-cell activity by identifying factors, and determining whether supernate containing a polypeptide of the invention proliferates and/or differentiates T-cells. T-cell activity is assessed using the GAS/SEAP/Neo construct produced in Example 31. Thus, factors that increase SEAP activity indicate the ability to activate the Jaks-STATS signal transduction pathway. The T-cell used in this assay is Jurkat T-cells (ATCC Accession No. TIB-152), although Molt-3 cells (ATCC Accession No. CRL-1552) and Molt-4 cells (ATCC Accession No. CRL-1582) cells can also be used.

[1158] Jurkat T-cells are lymphoblastic CD4+ Th1 helper cells. In order to generate stable cell lines, approximately 2 million Jurkat cells are transfected with the GAS-SEAP/neo vector using DMRIE-C (Life Technologies)(transfection procedure described below). The transfected cells are seeded to a density of approximately 20,000 cells per well and transfectants resistant to 1 mg/ml genticin selected. Resistant colonies are expanded and then tested for their response to increasing concentrations of interferon gamma. The dose response of a selected clone is demonstrated.

[1159] Specifically, the following protocol will yield sufficient cells for 75 wells containing 200 ul of cells. Thus, it is either scaled up, or performed in multiple to generate sufficient cells for multiple 96 well plates. Jurkat cells are maintained in RPMI+10% serum with 1% Pen-Strep. Combine 2.5 mls of OPTI-MEM (Life Technologies) with 10 ug of plasmid DNA in a T25 flask. Add 2.5 ml OPTI-MEM containing 50 ul of DMRIE-C and incubate at room temperature for 15-45 mins.

[1160] During the incubation period, count cell concentration, spin down the required number of cells (10⁷ per transfection), and resuspend in OPTI-MEM to a final concentration of 10⁷ cells/ml. Then add 1 ml of 1×10⁷ cells in OPTI-MEM to T25 flask and incubate at 37 degree C. for 6 hrs. After the incubation, add 10 ml of RPMI+15% serum.

[1161] The Jurkat:GAS-SEAP stable reporter lines are maintained in RPMI+10% serum, 1 mg/ml Genticin, and 1% Pen-Strep. These cells are treated with supernatants containing polypeptide of the present invention or polypeptide of the present invention induced polypeptides as produced by the protocol described in Example 30.

[1162] On the day of treatment with the supernatant, the cells should be washed and resuspended in fresh RPMI+10% serum to a density of 500,000 cells per ml. The exact number of cells required will depend on the number of supernatants being screened. For one 96 well plate, approximately 10 million cells (for 10 plates, 100 million cells) are required.

[1163] Transfer the cells to a triangular reservoir boat, in order to dispense the cells into a 96 well dish, using a 12 channel pipette. Using a 12 channel pipette, transfer 200 ul of cells into each well (therefore adding 100, 000 cells per well).

[1164] After all the plates have been seeded, 50 ul of the supernatants are transferred directly from the 96 well plate containing the supernatants into each well using a 12 channel pipette. In addition, a dose of exogenous interferon gamma (0.1, 1.0, 10 ng) is added to wells H9, H10, and H11 to serve as additional positive controls for the assay.

[1165] The 96 well dishes containing Jurkat cells treated with supernatants are placed in an incubator for 48 hrs (note: this time is variable between 48-72 hrs). 35 ul samples from each well are then transferred to an opaque 96 well plate using a 12 channel pipette. The opaque plates should be covered (using sellophene covers) and stored at −20 degree C. until SEAP assays are performed according to Example 36. The plates containing the remaining treated cells are placed at 4 degree C. and serve as a source of material for repeating the assay on a specific well if desired.

[1166] As a positive control, 100 Unit/ml interferon gamma can be used which is known to activate Jurkat T cells. Over 30 fold induction is typically observed in the positive control wells.

[1167] The above protocol may be used in the generation of both transient, as well as stable, transfected cells, which would be apparent to those of skill in the art.

### Example 33

### High-Throughput Screening Assay Identifying Myeloid Activity

[1168] The following protocol is used to assess myeloid activity of polypeptide of the present invention by determining whether polypeptide of the present invention proliferates and/or differentiates myeloid cells. Myeloid cell activity is assessed using the GAS/SEAP/Neo construct produced in Example 31. Thus, factors that increase SEAP activity indicate the ability to activate the Jaks-STATS signal transduction pathway. The myeloid cell used in this assay is U937, a pre-monocyte cell line, although TF-l, HL60, or KG1 can be used.

[1169] To transiently transfect U937 cells with the GAS/SEAP/Neo construct produced in Example 31, a DEAE-Dextran method (Kharbanda et. al., 1994, Cell Growth & Differentiation, 5:259-265) is used. First, harvest 2×10⁷ U937 cells and wash with PBS. The U937 cells are usually grown in RPMI 1640 medium containing 10% heat-inactivated fetal bovine serum (FBS) supplemented with 100 units/ml penicillin and 100 mg/ml streptomycin.

[1170] Next, suspend the cells in 1 ml of 20 mM Tris-HCl (pH 7.4) buffer containing 0.5 mg/ml DEAE-Dextran, 8 ug GAS-SEAP2 plasmid DNA, 140 mM NaCl, 5 mM KCl, 375 uM Na₂HPO₄.7H₂O, 1 mM MgCl₂, and 675 uM CaCl₂. Incubate at 37 degrees C. for 45 min.

[1171] Wash the cells with RPMI 1640 medium containing 10% FBS and then resuspend in 10 ml complete medium and incubate at 37 degree C. for 36 hr.

[1172] The GAS-SEAP/U937 stable cells are obtained by growing the cells in 400 ug/ml G418. The G418-free medium is used for routine growth but every one to two months, the cells should be re-grown in 400 ug/ml G418 for couple of passages.

[1173] These cells are tested by harvesting 1×10⁸ cells (this is enough for ten 96-well plates assay) and wash with PBS. Suspend the cells in 200 ml above described growth medium, with a final density of 5×10⁵ cells/ml. Plate 200 ul cells per well in the 96-well plate (or 1×10⁵ cells/well).

[1174] Add 50 ul of the supernatant prepared by the protocol described in Example 30. Incubate at 37 degree C. for 48 to 72 hr. As a positive control, 100 Unit/ml interferon gamma can be used which is known to activate U937 cells. Over 30 fold induction is typically observed in the positive control wells. SEAP assay the supernatant according to the protocol described in Example 36.

### Example 34

### High-Throughput Screening Assay Identifying Neuronal Activity

[1175] When cells undergo differentiation and proliferation, a group of genes are activated through many different signal transduction pathways. One of these genes, EGR1 (early growth response gene 1), is induced in various tissues and cell types upon activation. The promoter of EGR1 is responsible for such induction. Using the EGR1 promoter linked to reporter molecules, activation of cells can be assessed by polypeptide of the present invention.

[1176] Particularly, the following protocol is used to assess neuronal activity in PC12 cell lines. PC12 cells (rat phenochromocytoma cells) are known to proliferate and/or differentiate by activation with a number of mitogens, such as TPA (tetradecanoyl phorbol acetate), NGF (nerve growth factor), and EGF (epidermal growth factor). The EGR1 gene expression is activated during this treatment. Thus, by stably transfecting PC12 cells with a construct containing an EGR promoter linked to SEAP reporter, activation of PC12 cells by polypeptide of the present invention can be assessed.

[1177] The EGR/SEAP reporter construct can be assembled by the following protocol. The EGR-1 promoter sequence (−633 to +1)(Sakamoto K et al., Oncogene 6:867-871 (1991)) can be PCR amplified from human genomic DNA using the following primers:

5′ GCGCTCGAGGGATGACAGCGATAGAACCCCGG3′
(SEQ ID NO: 6)
5′ GCGAAGCTTCGCGACTCCCCGGATCCGCCTC-3′
(SEQ ID NO: 7)

[1178] Using the GAS:SEAP/Neo vector produced in Example 31, EGR1 amplified product can then be inserted into this vector. Linearize the GAS:SEAP/Neo vector using restriction enzymes XhoI/HindIII, removing the GAS/SV40 stuffer. Restrict the EGR1 amplified product with these same enzymes. Ligate the vector and the EGR1 promoter.

[1179] To prepare 96 well-plates for cell culture, two mls of a coating solution (1:30 dilution of collagen type I (Upstate Biotech Inc. Cat#08-115) in 30% ethanol (filter sterilized)) is added per one 10 cm plate or 50 ml per well of the 96-well plate, and allowed to air dry for 2 hr.

[1180] PC12 cells are routinely grown in RPMI-1640 medium (Bio Whittaker) containing 10% horse serum (JRH BIOSCIENCES, Cat. # 12449-78P), 5% heat-inactivated fetal bovine serum (FBS) supplemented with 100 units/ml penicillin and 100 ug/ml streptomycin on a precoated 10 cm tissue culture dish. One to four split is done every three to four days. Cells are removed from the plates by scraping and resuspended with pipetting up and down for more than 15 times.

[1181] Transfect the EGR/SEAP/Neo construct into PC12 using the Lipofectamine protocol described in Example 30. EGR-SEAP/PC12 stable cells are obtained by growing the cells in 300 ug/ml G418. The G418-free medium is used for routine growth but every one to two months, the cells should be re-grown in 300 ug/ml G418 for couple of passages.

[1182] To assay for neuronal activity, a 10 cm plate with cells around 70 to 80% confluent is screened by removing the old medium. Wash the cells once with PBS (Phosphate buffered saline). Then starve the cells in low serum medium (RPMI-1640 containing 1% horse serum and 0.5% FBS with antibiotics) overnight.

[1183] The next morning, remove the medium and wash the cells with PBS. Scrape off the cells from the plate, suspend the cells well in 2 ml low serum medium. Count the cell number and add more low serum medium to reach final cell density as 5×10⁵ cells/ml.

[1184] Add 200 ul of the cell suspension to each well of 96-well plate (equivalent to 1×10⁵ cells/well). Add 50 ul supernatant produced by Example 30, 37 degree C. for 48 to 72 hr. As a positive control, a growth factor known to activate PC12 cells through EGR can be used, such as 50 ng/ul of Neuronal Growth Factor (NGF). Over fifty-fold induction of SEAP is typically seen in the positive control wells. SEAP assay the supernatant according to Example 36.

### Example 35

### High-Throughput Screening Assay for T-cell Activity

[1185] NF-KB (Nuclear Factor KB) is a transcription factor activated by a wide variety of agents including the inflammatory cytokines IL-1 and TNF, CD30 and CD40, lymphotoxin-alpha and lymphotoxin-beta, by exposure to LPS or thrombin, and by expression of certain viral gene products. As a transcription factor, NF-KB regulates the expression of genes involved in immune cell activation, control of apoptosis (NF-KB appears to shield cells from apoptosis), B and T-cell development, anti-viral and antimicrobial responses, and multiple stress responses.

[1186] In non-stimulated conditions, NF- KB is retained in the cytoplasm with I-KB (Inhibitor KB). However, upon stimulation, I- KB is phosphorylated and degraded, causing NF-KB to shuttle to the nucleus, thereby activating transcription of target genes. Target genes activated by NF-KB include IL-2, IL-6, GM-CSF, ICAM-1 and class 1 MHC.

[1187] Due to its central role and ability to respond to a range of stimuli, reporter constructs utilizing the NF-KB promoter element are used to screen the supernatants produced in Example 30. Activators or inhibitors of NF-KB would be useful in treating, preventing, and/or diagnosing diseases. For example, inhibitors of NF-KB could be used to treat those diseases related to the acute or chronic activation of NF-KB, such as rheumatoid arthritis.

[1188] To construct a vector containing the NF-KB promoter element, a PCR based strategy is employed. The upstream primer contains four tandem copies of the NF-KB binding site (GGGGACTTTCCC) (SEQ ID NO: 8), 18 bp of sequence complementary to the 5′ end of the SV40 early promoter sequence, and is flanked with an XhoI site:

| | |
|---|---|
| 5′:GCGGCCTCGAGGGGACTTTCCCGGGGACTTTCCGGGGACTTTCCGGGACTTTC | (SEQ ID NO: 9) |
| CATCCTGCCATCTCAATTAG:3′ | |

[1189] The downstream primer is complementary to the 3′ end of the SV40 promoter and is flanked with a Hind III site:

[1190] 5′:GCGGCAAGCTTTTTGCAAAGCCTAGGC:3′ (SEQ ID NO: 4)

[1191] PCR amplification is performed using the SV40 promoter template present in the pB-gal:promoter plasmid obtained from Clontech. The resulting PCR fragment is digested with XhoI and Hind III and subcloned into BLSK2-. (Stratagene) Sequencing with the T7 and T3 primers confirms the insert contains the following sequence:

| | |
|---|---|
| 5′:CTCGAGGGGACTTTCCCGGGGACTTTCCGGGGACTTTCCGGGACTTTCCATCTG | (SEQ ID NO: 10) |
| CCATCTCAATTAGTCAGCAACCATAGTCCCGCCCCTAACTCCGCCCATCCCGCCC | |
| CTAACTCCGCCCAGTTCCGCCCATTCTCCGCCCCATGGCTGACTAATTTTTTTTAT | |
| TTATGCAGAGGCCGAGGCCGCCTCGGCCTCTGAGCTATTCCAGAAGTAGTGAGG | |
| AGGCTTTTTTGGAGGCCTAGGCTTTTGCAAAAAGCTT:3′ | |

[1192] Next, replace the SV40 minimal promoter element present in the pSEAP2-promoter plasmid (Clontech) with this NF-KB/SV40 fragment using XhoI and HindIII. However, this vector does not contain a neomycin resistance gene, and therefore, is not preferred for mammalian expression systems.

[1193] In order to generate stable mammalian cell lines, the NF-KB/SV40/SEAP cassette is removed from the above NF-KB/SEAP vector using restriction enzymes SalI and NotI, and inserted into a vector containing neomycin resistance. Particularly, the NF-KB/SV40/SEAP cassette was inserted into pGFP-1 (Clontech), replacing the GFP gene, after restricting pGFP-1 with SalI and NotI.

[1194] Once NF-KB/SV40/SEAP/Neo vector is created, stable Jurkat T-cells are created and maintained according to the protocol described in Example 32. Similarly, the method for assaying supernatants with these stable Jurkat T-cells is also described in Example 32. As a positive control, exogenous TNF alpha (0.1,1, 10 ng) is added to wells H9, H10, and H11, with a 5-10 fold activation typically observed.

### Example 36

### Assay for SEAP Activity

[1195] As a reporter molecule for the assays described in Examples 32-35, SEAP activity is assayed using the Tropix Phospho-light Kit (Cat. BP-400) according to the following general procedure. The Tropix Phospho-light Kit supplies the Dilution, Assay, and Reaction Buffers used below.

[1196] Prime a dispenser with the 2.5× Dilution Buffer and dispense 15 ul of 2.5×dilution buffer into Optiplates containing 35 ul of a supernatant. Seal the plates with a plastic sealer and incubate at 65 degree C. for 30 min. Separate the Optiplates to avoid uneven heating.

[1197] Cool the samples to room temperature for 15 minutes. Empty the dispenser and prime with the Assay Buffer. Add 50 ml Assay Buffer and incubate at room temperature 5 min. Empty the dispenser and prime with the Reaction Buffer (see the Table below). Add 50 ul Reaction Buffer and incubate at room temperature for 20 minutes. Since the intensity of the chemiluminescent signal is time dependent, and it takes about 10 minutes to read 5 plates on a luminometer, thus one should treat 5 plates at each time and start the second set 10 minutes later.

[1198] Read the relative light unit in the luminometer. Set H12 as blank, and print the results. An increase in chemiluminescence indicates reporter activity.

Reaction Buffer Formulation:

| # of plates | Rxn buffer diluent (ml) | CSPD (ml) |
|---|---|---|
| 10 | 60 | 3 |
| 11 | 65 | 3.25 |
| 12 | 70 | 3.5 |
| 13 | 75 | 3.75 |
| 14 | 80 | 4 |
| 15 | 85 | 415 |
| 16 | 90 | 4.5 |
| 17 | 95 | 4.75 |
| 18 | 100 | 5 |
| 19 | 105 | 5.25 |
| 20 | 110 | 5.5 |
| 21 | 115 | 5.75 |
| 22 | 120 | 6 |
| 23 | 125 | 6.25 |
| 24 | 130 | 6.5 |
| 25 | 135 | 6.75 |
| 26 | 140 | 7 |
| 27 | 145 | 7.25 |
| 28 | 150 | 7.5 |
| 29 | 155 | 7.75 |
| 30 | 160 | 8 |
| 31 | 165 | 8.25 |
| 32 | 170 | 8.5 |
| 33 | 175 | 8.75 |
| 34 | 180 | 9 |
| 35 | 185 | 9.25 |
| 36 | 190 | 9.5 |
| 37 | 195 | 9.75 |
| 38 | 200 | 10 |
| 39 | 205 | 10.25 |
| 40 | 210 | 10.5 |
| 41 | 215 | 10.75 |
| 42 | 220 | 11 |
| 43 | 225 | 11.25 |
| 44 | 230 | 11.5 |
| 45 | 235 | 11.75 |
| 46 | 240 | 12 |
| 47 | 245 | 12.25 |
| 48 | 250 | 12.5 |
| 49 | 255 | 12.75 |
| 50 | 260 | 13 |

### Example 37

### High-Throughput Screening Assay Identifying Changes in Small Molecule Concentration and Membrane Permeability

[1199] Binding of a ligand to a receptor is known to alter intracellular levels of small molecules, such as calcium, potassium, sodium, and pH, as well as alter membrane potential. These alterations can be measured in an assay to identify supernatants which bind to receptors of a particular cell. Although the following protocol describes an assay for calcium, this protocol can easily be modified to detect changes in potassium, sodium, pH, membrane potential, or any other small molecule which is detectable by a fluorescent probe.

[1200] The following assay uses Fluorometric Imaging Plate Reader (“FLIPR”)to measure changes in fluorescent molecules (Molecular Probes) that bind small molecules. Clearly, any fluorescent molecule detecting a small molecule can be used instead of the calcium fluorescent molecule, fluo-4 (Molecular Probes, Inc.; catalog no. F-14202), used here.

[1201] For adherent cells, seed the cells at 10,000 -20,000 cells/well in a Co-star black 96-well plate with clear bottom. The plate is incubated in a CO₂ incubator for 20 hours. The adherent cells are washed two times in Biotek washer with 200 ul of HBSS (Hank's Balanced Salt Solution) leaving 100 ul of buffer after the final wash.

[1202] A stock solution of 1 mg/ml fluo-4 is made in 10% pluronic acid DMSO. To load the cells with fluo-4 , 50 ul of 12 ug/ml fluo-4 is added to each well. The plate is incubated at 37 degrees C. in a CO₂ incubator for 60 min. The plate is washed four times in the Biotek washer with HBSS leaving 100 ul of buffer.

[1203] For non-adherent cells, the cells are spun down from culture media. Cells are re-suspended to 2-5×10⁶ cells/ml with HBSS in a 50-ml conical tube. 4 ul of 1 mg/ml fluo-4 solution in 10% pluronic acid DMSO is added to each ml of cell suspension. The tube is then placed in a 37 degrees C. water bath for 30-60 min. The cells are washed twice with HBSS, resuspended to 1×10⁶ cells/ml, and dispensed into a microplate, 100 ul/well. The plate is centrifuged at 1000 rpm for 5 min. The plate is then washed once in Denley Cell Wash with 200 ul, followed by an aspiration step to 100 ul final volume.

[1204] For a non-cell based assay, each well contains a fluorescent molecule, such as fluo-4. The supernatant is added to the well, and a change in fluorescence is detected.

[1205] To measure the fluorescence of intracellular calcium, the FLIPR is set for the following parameters: (1) System gain is 300-800 mW; (2) Exposure time is 0.4 second; (3) Camera F/stop is F/2; (4) Excitation is 488 nm; (5) Emission is 530 nm; and (6) Sample addition is 50 ul. Increased emission at 530 nm indicates an extracellular signaling event caused by the a molecule, either polypeptide of the present invention or a molecule induced by polypeptide of the present invention, which has resulted in an increase in the intracellular Ca⁺⁺ concentration.

### Example 38

### High-Throughput Screening Assay Identifying Tyrosine Kinase Activity

[1206] The Protein Tyrosine Kinases (PTK) represent a diverse group of transmembrane and cytoplasmic kinases. Within the Receptor Protein Tyrosine Kinase RPTK) group are receptors for a range of mitogenic and metabolic growth factors including the PDGF, FGF, EGF, NGF, HGF and Insulin receptor subfamilies. In addition there are a large family of RPTKs for which the corresponding ligand is unknown. Ligands for RPTKs include mainly secreted small proteins, but also membrane-bound and extracellular matrix proteins.

[1207] Activation of RPTK by ligands involves ligand-mediated receptor dimerization, resulting in transphosphorylation of the receptor subunits and activation of the cytoplasmic tyrosine kinases. The cytoplasmic tyrosine kinases include receptor associated tyrosine kinases of the src-family (e.g., src, yes, lck, lyn, fyn) and non-receptor linked and cytosolic protein tyrosine kinases, such as the Jak family, members of which mediate signal transduction triggered by the cytokine superfamily of receptors (e.g., the Interleukins, Interferons, GM-CSF, and Leptin).

[1208] Because of the wide range of known factors capable of stimulating tyrosine kinase activity, identifying whether polypeptide of the present invention or a molecule induced by polypeptide of the present invention is capable of activating tyrosine kinase signal transduction pathways is of interest. Therefore, the following protocol is designed to identify such molecules capable of activating the tyrosine kinase signal transduction pathways.

[1209] Seed target cells (e.g., primary keratinocytes) at a density of approximately 25,000 cells per well in a 96 well Loprodyne Silent Screen Plates purchased from Nalge Nunc (Naperville, Ill.). The plates are sterilized with two 30 minute rinses with 100% ethanol, rinsed with water and dried overnight. Some plates are coated for 2 hr with 100 ml of cell culture grade type I collagen (50 mg/ml), gelatin (2%) or polylysine (50 mg/ml), all of which can be purchased from Sigma Chemicals (St. Louis, Mo.) or 10% Matrigel purchased from Becton Dickinson (Bedford, Mass.), or calf serum, rinsed with PBS and stored at 4 degree C. Cell growth on these plates is assayed by seeding 5,000 cells/well in growth medium and indirect quantitation of cell number through use of alamarBlue as described by the manufacturer Alamar Biosciences, Inc. (Sacramento, Calif.) after 48 hr. Falcon plate covers #3071 from Becton Dickinson (Bedford, Mass.) are used to cover the Loprodyne Silent Screen Plates. Falcon Microtest III cell culture plates can also be used in some proliferation experiments.

[1210] To prepare extracts, A431 cells are seeded onto the nylon membranes of Loprodyne plates (20,000/200 ml/well) and cultured overnight in complete medium. Cells are quiesced by incubation in serum-free basal medium for 24 hr. After 5-20 minutes treatment with EGF (60 ng/ml) or 50 ul of the supernatant produced in Example 30, the medium was removed and 100 ml of extraction buffer ((20 mM HEPES pH 7.5, 0.15 M NaCl, 1% Triton X-100, 0.1% SDS, 2 mM Na3VO4, 2 mM Na4P2O7 and a cocktail of protease inhibitors (# 1836170) obtained from Boeheringer Mannheim (Indianapolis, Ind.)) is added to each well and the plate is shaken on a rotating shaker for 5 minutes at 4° C. The plate is then placed in a vacuum transfer manifold and the extract filtered through the 0.45 mm membrane bottoms of each well using house vacuum. Extracts are collected in a 96-well catch/assay plate in the bottom of the vacuum manifold and immediately placed on ice. To obtain extracts clarified by centrifugation, the content of each well, after detergent solubilization for 5 minutes, is removed and centrifuged for 15 minutes at 4 degree C. at 16,000×g.

[1211] Test the filtered extracts for levels of tyrosine kinase activity. Although many methods of detecting tyrosine kinase activity are known, one method is described here.

[1212] Generally, the tyrosine kinase activity of a supernatant is evaluated by determining its ability to phosphorylate a tyrosine residue on a specific substrate (a biotinylated peptide). Biotinylated peptides that can be used for this purpose include PSK1 (corresponding to amino acids 6-20 of the cell division kinase cdc2-p34) and PSK2 (corresponding to amino acids 1-17 of gastrin). Both peptides are substrates for a range of tyrosine kinases and are available from Boehringer Mannheim.

[1213] The tyrosine kinase reaction is set up by adding the following components in order. First, add 10 ul of 5uM Biotinylated Peptide, then 10 ul ATP/Mg₂₊ (5 mM ATP/50 mM MgCl₂), then 10 ul of 5× Assay Buffer (40 mM imidazole hydrochloride, pH7.3, 40 mM beta-glycerophosphate, 1 mM EGTA, 100 mM MgCl₂, 5 mM MnCl₂, 0.5 mg/ml BSA), then 5 ul of Sodium Vanadate (1 mM), and then 5 ul of water. Mix the components gently and preincubate the reaction mix at 30 degree C. for 2 min. Initial the reaction by adding 10 ul of the control enzyme or the filtered supernatant.

[1214] The tyrosine kinase assay reaction is then terminated by adding 10 ul of 120 mm EDTA and place the reactions on ice.

[1215] Tyrosine kinase activity is determined by transferring 50 ul aliquot of reaction mixture to a microtiter plate (MTP) module and incubating at 37 degree C. for 20 min. This allows the streptavidin coated 96 well plate to associate with the biotinylated peptide. Wash the MTP module with 300 ul/well of PBS four times. Next add 75 ul of anti-phospotyrosine antibody conjugated to horse radish peroxidase (anti-P-Tyr-POD(0.5 u/ml)) to each well and incubate at 37 degree C. for one hour. Wash the well as above.

[1216] Next add 100 ul of peroxidase substrate solution (Boehringer Mannheim) and incubate at room temperature for at least 5 mins (up to 30 min). Measure the absorbance of the sample at 405 nm by using ELISA reader. The level of bound peroxidase activity is quantitated using an ELISA reader and reflects the level of tyrosine kinase activity.

### Example 39

### High-Throughput Screening Assay Identifying Phosphorylation Activity

[1217] As a potential alternative and/or complement to the assay of protein tyrosine kinase activity described in Example 38, an assay which detects activation (phosphorylation) of major intracellular signal transduction intermediates can also be used. For example, as described below one particular assay can detect tyrosine phosphorylation of the Erk-1 and Erk-2 kinases. However, phosphorylation of other molecules, such as Raf, JNK, p38 MAP, Map kinase kinase (MEK), MEK kinase, Src, Muscle specific kinase (MuSK), IRAK, Tec, and Janus, as well as any other phosphoserine, phosphotyrosine, or phosphothreonine molecule, can be detected by substituting these molecules for Erk-1 or Erk-2 in the following assay.

[1218] Specifically, assay plates are made by coating the wells of a 96-well ELISA plate with 0.1 ml of protein G (1 ug/ml) for 2 hr at room temp, (RT). The plates are then rinsed with PBS and blocked with 3% BSA/PBS for 1 hr at RT. The protein G plates are then treated with 2 commercial monoclonal antibodies (100 ng/well) against Erk-1 and Erk-2 (1 hr at RT) (Santa Cruz Biotechnology). (To detect other molecules, this step can easily be modified by substituting a monoclonal antibody detecting any of the above described molecules.) After 3-5 rinses with PBS, the plates are stored at 4 degree C. until use.

[1219] A431 cells are seeded at 20,000/well in a 96-well Loprodyne filterplate and cultured overnight in growth medium. The cells are then starved for 48 hr in basal medium (DMEM) and then treated with EGF (6ng/well) or 50 ul of the supernatants obtained in Example 30 for 5-20 minutes. The cells are then solubilized and extracts filtered directly into the assay plate.

[1220] After incubation with the extract for 1 hr at RT, the wells are again rinsed. As a positive control, a commercial preparation of MAP kinase (10 ng/well) is used in place of A431 extract. Plates are then treated with a commercial polyclonal (rabbit) antibody (1 ug/ml) which specifically recognizes the phosphorylated epitope of the Erk-1 and Erk-2 kinases (1 hr at RT). This antibody is biotinylated by standard procedures. The bound polyclonal antibody is then quantitated by successive incubations with Europium-streptavidin and Europium fluorescence enhancing reagent in the Wallac DELFIA instrument (time-resolved fluorescence). An increased fluorescent signal over background indicates a phosphorylation by polypeptide of the present invention or a molecule induced by polypeptide of the present invention.

### Example 40

### Assay for the Stimulation of Bone Marrow CD34+ Cell Proliferation

[1221] This assay is based on the ability of human CD34+ to proliferate in the presence of hematopoietic growth factors and evaluates the ability of isolated polypeptides expressed in mammalian cells to stimulate proliferation of CD34+ cells.

[1222] It has been previously shown that most mature precursors will respond to only a single signal. More immature precursors require at least two signals to respond. Therefore, to test the effect of polypeptides on hematopoietic activity of a wide range of progenitor cells, the assay contains a given polypeptide in the presence or absence of other hematopoietic growth factors. Isolated cells are cultured for 5 days in the presence of Stem Cell Factor (SCF) in combination with tested sample. SCF alone has a very limited effect on the proliferation of bone marrow (BM) cells, acting in such conditions only as a “survival” factor. However, combined with any factor exhibiting stimulatory effect on these cells (e.g., IL-3), SCF will cause a synergistic effect. Therefore, if the tested polypeptide has a stimulatory effect on hematopoietic progenitors, such activity can be easily detected. Since normal BM cells have a low level of cycling cells, it is likely that any inhibitory effect of a given polypeptide, or agonists or antagonists thereof, might not be detected. Accordingly, assays for an inhibitory effect on progenitors is preferably tested in cells that are first subjected to in vitro stimulation with SCF+ IL+ 3, and then contacted with the compound that is being evaluated for inhibition of such induced proliferation.

[1223] Briefly, CD34+ cells are isolated using methods known in the art. The cells are thawed and resuspended in medium (QBSF 60 serum-free medium with 1% L-glutamine (500 ml) Quality Biological, Inc., Gaithersburg, Md. Cat# 160-204-101). After several gentle centrifugation steps at 200×g, cells are allowed to rest for one hour. The cell count is adjusted to 2.5×10⁵ cells/ml. During this time, 100 μl of sterile water is added to the peripheral wells of a 96-well plate. The cytokines that can be tested with a given polypeptide in this assay is rhSCF (R&D Systems, Minneapolis, MN, Cat# 255-SC) at 50 ng/ml alone and in combination with rhSCF and rhIL-3 (R&D Systems, Minneapolis, Minn., Cat #203-ML) at 30 ng/ml. After one hour, 10 μl of prepared cytokines, 50 μl of the supernatants prepared in Example 30 (supernatants at 1:2 dilution=50 μl) and 20 μl of diluted cells are added to the media which is already present in the wells to allow for a final total volume of 100 μl. The plates are then placed in a 37° C./5% CO₂ incubator for five days.

[1224] Eighteen hours before the assay is harvested, 0.5 μCi/well of [3H] Thymidine is added in a 10 μl volume to each well to determine the proliferation rate. The experiment is terminated by harvesting the cells from each 96-well plate to a filtermat using the Tomtec Harvester 96. After harvesting, the filtermats are dried, trimmed and placed into OmniFilter assemblies consisting of one OmniFilter plate and one OmniFilter Tray. 60 μl Microscint is added to each well and the plate sealed with TopSeal-A press-on sealing film A bar code 15 sticker is affixed to the first plate for counting. The sealed plates are then loaded and the level of radioactivity determined via the Packard Top Count and the printed data collected for analysis. The level of radioactivity reflects the amount of cell proliferation.

[1225] The studies described in this example test the activity of a given polypeptide to stimulate bone marrow CD34+ cell proliferation. One skilled in the art could easily modify the exemplified studies to test the activity of polynucleotides (e.g., gene therapy), antibodies, agonists, and/or antagonists and fragments and variants thereof. As a nonlimiting example, potential antagonists tested in this assay would be expected to inhibit cell proliferation in the presence of cytokines and/or to increase the inhibition of cell proliferation in the presence of cytokines and a given polypeptide. In contrast, potential agonists tested in this assay would be expected to enhance cell proliferation and/or to decrease the inhibition of cell proliferation in the presence of cytokines and a given polypeptide.

[1226] The ability of a gene to stimulate the proliferation of bone marrow CD34+ cells indicates that polynucleotides and polypeptides corresponding to the gene are useful for the diagnosis and treatment of disorders affecting the immune system and hematopoiesis. Representative uses are described in the “Immune Activity” and “Infectious Disease” sections above, and elsewhere herein.

### Example 41

### Assay for Extracellular Matrix Enhanced Cell Response (EMECR)

[1227] The objective of the Extracellular Matrix Enhanced Cell Response (EMECR) assay is to identify gene products (e.g., isolated polypeptides) that act on the hematopoletic stem cells in the context of the extracellular matrix (ECM) induced signal.

[1228] Cells respond to the regulatory factors in the context of signal(s) received from the surrounding microenvironment. For example, fibroblasts, and endothelial and epithelial stem cells fail to replicate in the absence of signals from the ECM. Hematopoietic stem cells can undergo self-renewal in the bone marrow, but not in in vitro suspension culture. The ability of stem cells to undergo self-renewal in vitro is dependent upon their interaction with the stromal cells and the ECM protein fibronectin (fn). Adhesion of cells to fn is mediated by the α₅.β₁ and α₄.β₁ integrin receptors, which are expressed by human and mouse hematopoietic stem cells. The factor(s) which integrate with the ECM environment and are responsible for stimulating stem cell self-renewal have not yet been identified. Discovery of such factors should be of great interest in gene therapy and bone marrow transplant applications

[1229] Briefly, polystyrene, non tissue culture treated, 96-well plates are coated with fn fragment at a coating concentration of 0.2 μg/cm². Mouse bone marrow cells are plated (1,000 cells/well) in 0.2 ml of serum-free medium. Cells cultured in the presence of IL-3 (5 ng/ml)+ SCF (50 ng/ml) would serve as the positive control, conditions under which little self-renewal but pronounced differentiation of the stem cells is to be expected. Gene products of the invention (e.g., including, but not limited to, polynucleotides and polypeptides of the present invention, and supernatants produced in Example 30), are tested with appropriate negative controls in the presence and absence of SCF(5.0 ng/ml), where test factor supernatants represent 10% of the total assay volume. The plated cells are then allowed to grow by incubating in a low oxygen environment (5% CO₂, 7% O₂, and 88% N₂) tissue culture incubator for 7 days. The number of proliferating cells within the wells is then quantitated by measuring thymidine incorporation into cellular DNA. Verification of the positive hits in the assay will require phenotypic characterization of the cells, which can be accomplished by scaling up of the culture system and using appropriate antibody reagents against cell surface antigens and FACScan.

[1230] One skilled in the art could easily modify the exemplified studies to test the activity of polynucleotides (e.g., gene therapy), antibodies, agonists, and/or antagonists and fragments and variants thereof.

[1231] If a particular polypeptide of the present invention is found to be a stimulator of hematopoietic progenitors, polynucleotides and polypeptides corresponding to the gene encoding said polypeptide may be useful for the diagnosis and treatment of disorders affecting the immune system and hematopoiesis. Representative uses are described in the “Immune Activity” and “Infectious Disease” sections above, and elsewhere herein. The gene product may also be useful in the expansion of stem cells and committed progenitors of various blood lineages, and in the differentiation and/or proliferation of various cell types.

[1232] Additionally, the polynucleotides and/or polypeptides of the gene of interest and/or agonists and/or antagonists thereof, may also be employed to inhibit the proliferation and differentiation of hematopoietic cells and therefore may be employed to protect bone marrow stem cells from chemotherapeutic agents during chemotherapy. This antiproliferative effect may allow administration of higher doses of chemotherapeutic agents and, therefore, more effective chemotherapeutic treatment.

[1233] Moreover, polynucleotides and polypeptides corresponding to the gene of interest may also be useful for the treatment and diagnosis of hematopoietic related disorders such as, for example, anemia, pancytopenia, leukopenia, thrombocytopenia or leukemia since stromal cells are important in the production of cells of hematopoietic lineges. The uses include bone marrow cell ex-vivo culture, bone marrow transplantation, bone marrow reconstitution, radiotherapy or chemotherapy of neoplasia.

### Example 42

### Human Dermal Fibroblast and Aortic Smooth Muscle Cell Proliferation

[1234] The polypeptide of interest is added to cultures of normal human dermal fibroblasts (NHDF) and human aortic smooth muscle cells (AOSMC) and two co-assays are performed with each sample. The first assay examines the effect of the polypeptide of interest on the proliferation of normal human dermal fibroblasts (NHDF) or aortic smooth muscle cells (AoSMC). Aberrant growth of fibroblasts or smooth muscle cells is a part of several pathological processes, including fibrosis, and restenosis. The second assay examines IL6 production by both NHDF and SMC. IL6 production is an indication of functional activation. Activated cells will have increased production of a number of cytokines and other factors, which can result in a proinflammatory or immunomodulatory outcome. Assays are run with and without co-TNFa stimulation, in order to check for costimulatory or inhibitory activity.

[1235] Briefly, on day 1, 96-well black plates are set up with 1000 cells/well (NHDF) or 2000 cells/well (AoSMC) in 100 μl culture media. NHDF culture media contains: Clonetics FB basal media, 1 mg/ml hFGF, 5 mg/ml insulin, 50 mg/ml gentamycin, 2% FBS, while AoSMC culture media contains Clonetics SM basal media, 0.5 μg/ml hEGF, 5 mg/ml insulin, 1 μg/ml hFGF, 50 mg/ml gentamycin, 50 μg/ml Amphotericin B, 5% FBS. After incubation at 37° C. for at least 4-5 hours culture media is aspirated and replaced with growth arrest media. Growth arrest media for NHDF contains fibroblast basal media, 50 mg/ml gentamycin, 2% FBS, while growth arrest media for AoSMC contains SM basal media, 50 mg/ml gentamycin, 50μg/ml Amphotericin B, 0.4% FBS. Incubate at 37° C. until day 2.

[1236] On day 2, serial dilutions and templates of the polypeptide of interest are designed such that they always include media controls and known-protein controls. For both stimulation and inhibition experiments, proteins are diluted in growth arrest media. For inhibition experiments, TNFa is added to a final concentration of 2 ng/ml (NHDF) or 5 ng/ml (AoSMC). Add ⅓ vol media containing controls or polypeptides of the present invention and incubate at 37 degrees C./5% CO₂ until day 5.

[1237] Transfer 60 μl from each well to another labeled 96-well plate, cover with a plate-sealer, and store at 4 degrees C. until Day 6 (for IL6 ELISA). To the remaining 100 μl in the cell culture plate, aseptically add Alamar Blue in an amount equal to 10% of the culture volume (10 μl). Return plates to incubator for 3 to 4 hours. Then measure fluorescence with excitation at 530 nm and emission at 590 nm using the CytoFluor. This yields the growth stimulation/inhibition data.

[1238] On day 5, the IL6 ELISA is performed by coating a 96 well plate with 50-100 ul/well of Anti-Human IL6 Monoclonal antibody diluted in PBS, pH 7.4, incubate ON at room temperature.

[1239] On day 6, empty the plates into the sink and blot on paper towels. Prepare Assay Buffer containing PBS with 4% BSA. Block the plates with 200 μl/well of Pierce Super Block blocking buffer in PBS for 1-2 hr and then wash plates with wash buffer (PBS, 0.05% Tween-20). Blot plates on paper towels. Then add 50 μl/well of diluted Anti-Human IL-6 Monoclonal, Biotin-labeled antibody at 0.50 mg/ml. Make dilutions of IL-6 stock in media (30, 10, 3, 1, 0.3, 0 ng/ml). Add duplicate samples to top row of plate. Cover the plates and incubate for 2 hours at RT on shaker.

[1240] Plates are washed with wash buffer and blotted on paper towels. Dilute EU-labeled Streptavidin 1:1000 in Assay buffer, and add 100 μl/well. Cover the plate and incubate 1 h at RT. Plates are again washed with wash buffer and blotted on paper towels.

[1241] Add 100 μl/well of Enhancement Solution. Shake for 5 minutes. Read the plate on the Wallac DELFIA Fluorometer. Readings from triplicate samples in each assay were tabulated and averaged.

[1242] A positive result in this assay suggests AoSMC cell proliferation and that the polypeptide of the present invention may be involved in dermal fibroblast proliferation and/or smooth muscle cell proliferation. A positive result also suggests many potential uses of polypeptides, polynucleotides, agonists and/or antagonists of the polynucleotide/polypeptide of the present invention which gives a positive result. For example, inflammation and immune responses, wound healing, and angiogenesis, as detailed throughout this specification. Particularly, polypeptides of the present invention and polynucleotides of the present invention may be used in wound healing and dermal regeneration, as well as the promotion of vasculogenesis, both of the blood vessels and lymphatics. The growth of vessels can be used in the treatment of, for example, cardiovascular diseases. Additionally, antagonists of polypeptides and polynucleotides of the invention may be useful in treating diseases, disorders, and/or conditions which involve angiogenesis by acting as an anti-vascular agent (e.g., anti-angiogenesis). These diseases, disorders, and/or conditions are known in the art and/or are described herein, such as, for example, malignancies, solid tumors, benign tumors, for example hemangiomas, acoustic neuromas, neurofibromas, trachomas, and pyogenic granulomas; artheroscleric plaques; ocular angiogenic diseases, for example, diabetic retinopathy, retinopathy of prematurity, macular degeneration, corneal graft rejection, neovascular glaucoma, retrolental fibroplasia, rubeosis, retinoblastoma, uvietis and Pterygia (abnormal blood vessel growth) of the eye; rheumatoid arthritis; psoriasis; delayed wound healing; endometriosis; vasculogenesis; granulations; hypertrophic scars (keloids); nonunion fractures; scleroderma; trachoma; vascular adhesions; myocardial angiogenesis; coronary collaterals; cerebral collaterals; arteriovenous malformations; ischemic limb angiogenesis; Osler-Webber Syndrome; plaque neovascularization; telangiectasia; hemophiliac joints; angiofibroma; fibromuscular dysplasia; wound granulation; Crohn's disease; and atherosclerosis. Moreover, antagonists of polypeptides and polynucleotides of the invention may be useful in treating anti-hyperproliferative diseases and/or anti-inflammatory known in the art and/or described herein.

[1243] One skilled in the art could easily modify the exemplified studies to test the activity of polynucleotides (e.g., gene therapy), antibodies, agonists, and/or antagonists and fragments and variants thereof.

### Example 43

### Cellular Adhesion Molecule (CAM) Expression on Endothelial Cells

[1244] The recruitment of lymphocytes to areas of inflammation and angiogenesis involves specific receptor-ligand interactions between cell surface adhesion molecules (CAMs) on lymphocytes and the vascular endothelium. The adhesion process, in both normal and pathological settings, follows a multi-step cascade that involves intercellular adhesion molecule-1 (ICAM-1), vascular cell adhesion molecule-1 (VCAM-1), and endothelial leukocyte adhesion molecule-1 (E-selectin) expression on endothelial cells (EC). The expression of these molecules and others on the vascular endothelium determines the efficiency with which leukocytes may adhere to the local vasculature and extravasate into the local tissue during the development of an inflammatory response. The local concentration of cytokines and growth factor participate in the modulation of the expression of these CAMs.

[1245] Briefly, endothelial cells (e.g., Human Umbilical Vein Endothelial cells (HUVECs)) are grown in a standard 96 well plate to confluence, growth medium is removed from the cells and replaced with 100 μl of 199 Medium (10% fetal bovine serum (FBS)). Samples for testing and positive or negative controls are added to the plate in triplicate (in 10 μl volumes). Plates are then incubated at 37° C. for either 5 h (selectin and integrin expression) or 24 h (integrin expression only). Plates are aspirated to remove medium and 100 μl of 0.1% paraformaldehyde-PBS(with Ca++ and Mg++) is added to each well. Plates are held at 4° C. for 30 min. Fixative is removed from the wells and wells are washed 1× with PBS(+Ca,Mg)+ 0.5% BSA and drained. 10 μl of diluted primary antibody is added to the test and control wells. Anti-ICAM-1-Biotin, Anti-VCAM-1-Biotin and Anti-E-selectin-Biotin are used at a concentration of 10 μg/ml (1:10 dilution of 0.1 mg/ml stock antibody). Cells are incubated at 37° C. for 30 min. in a humidified environment. Wells are washed three times with PBS(+Ca,Mg) + 0.5% BSA. 20 μl of diluted ExtrAvidin-Alkaline Phosphatase (1:5,000 dilution, referred to herein as the working dilution) are added to each well and incubated at 37° C. for 30 min. Wells are washed three times with PBS(+Ca,Mg)+0.5% BSA. Dissolve 1 tablet of p-Nitrophenol Phosphate pNPP per 5 ml of glycine buffer (pH 10.4). 100 μl of pNPP substrate in glycine buffer is added to each test well. Standard wells in triplicate are prepared from the working dilution of the ExtrAvidin-Alkaline Phosphotase in glycine buffer: 1:5,000 (10⁰)>10^{-0.5}>10⁻¹>10^{-1.5}0.5 μl of each dilution is added to triplicate wells and the resulting AP content in each well is 5.50 ng, 1.74 ng, 0.55 ng, 0.18 ng. 100 μl of pNNP reagent is then added to each of the standard wells. The plate is incubated at 37° C. for 4 h. A volume of 50 μl of 3M NaOH is added to all wells. The plate is read on a plate reader at 405 nm using the background subtraction option on blank wells filled with glycine buffer only. Additionally, the template is set up to indicate the concentration of AP-conjugate in each standard well [5.50 ng; 1.74 ng; 0.55 ng; 0.18 ng]. Results are indicated as amount of bound AP-conjugate in each sample.

### Example 44

### Alamar Blue Endothelial Cells Proliferation Assay

[1246] This assay may be used to quantitatively determine protein mediated inhibition of bFGF-induced proliferation of Bovine Lymphatic Endothelial Cells (LECs), Bovine Aortic Endothelial Cells (BAECs) or Human Microvascular Uterine Myometrial Cells (UTMECs). This assay incorporates a fluorometric growth indicator based on detection of metabolic activity. A standard Alamar Blue Proliferation Assay is prepared in EGM-2 MV with 10 ng /ml of bFGF added as a source of endothelial cell stimulation. This assay may be used with a variety of endothelial cells with slight changes in growth medium and cell concentration. Dilutions of the protein batches to be tested are diluted as appropriate. Serum-free medium (GIBCO SFM) without bFGF is used as a non-stimulated control and Angiostatin or TSP-1 are included as a known inhibitory controls.

[1247] Briefly, LEC, BAECs or UTMECs are seeded in growth media at a density of 5000 to 2000 cells/well in a 96 well plate and placed at 37degrees C. overnight. After the overnight incubation of the cells, the growth media is removed and replaced with GIBCO EC-SFM. The cells are treated with the appropriate dilutions of the protein of interest or control protein sample(s) (prepared in SFM) in triplicate wells with additional bFGF to a concentration of 10 ng/ ml. Once the cells have been treated with the samples, the plate(s) is/are placed back in the 37° C. incubator for three days. After three days 10 ml of stock alamar blue (Biosource Cat# DAL 1100) is added to each well and the plate(s) is/are placed back in the 37° C. incubator for four hours. The plate(s) are then read at 530 nm excitation and 590 nm emission using the CytoFluor fluorescence reader. Direct output is recorded in relative fluorescence units.

[1248] Alamar blue is an oxidation-reduction indicator that both fluoresces and changes color in response to chemical reduction of growth medium resulting from cell growth. As cells grow in culture, innate metabolic activity results in a chemical reduction of the immediate surrounding environment. Reduction related to growth causes the indicator to change from oxidized (non-fluorescent blue) form to reduced (fluorescent red) form (i.e., stimulated proliferation will produce a stronger signal and inhibited proliferation will produce a weaker signal and the total signal is proportional to the total number of cells as well as their metabolic activity). The background level of activity is observed with the starvation medium alone. This is compared to the output observed from the positive control samples (bFGF in growth medium) and protein dilutions.

### Example 45

### Detection of Inhibition of a Mixed Lymphocyte Reaction

[1249] This assay can be used to detect and evaluate inhibition of a Mixed Lymphocyte Reaction (MLR) by gene products (e.g., isolated polypeptides). Inhibition of a MLR may be due to a direct effect on cell proliferation and viability, modulation of costimulatory molecules on interacting cells, modulation of adhesiveness between lymphocytes and accessory cells, or modulation of cytokine production by accessory cells. Multiple cells may be targeted by these polypeptides since the peripheral blood mononuclear fraction used in this assay includes T, B and natural killer lymphocytes, as well as monocytes and dendritic cells.

[1250] Polypeptides of interest found to inhibit the MLR may find application in diseases associated with lymphocyte and monocyte activation or proliferation. These include, but are not limited to, diseases such as asthma, arthritis, diabetes, inflammatory skin conditions, psoriasis, eczema, systemic lupus erythematosus, multiple sclerosis, glomerulonephritis, inflammatory bowel disease, crohn's disease, ulcerative colitis, arteriosclerosis, cirrhosis, graft vs. host disease, host vs. graft disease, hepatitis, leukemia and lymphoma.

[1251] Briefly, PBMCs from human donors are purified by density gradient centrifugation using Lymphocyte Separation Medium (LSM®, density 1.0770 g/ml, Organon Teknika Corporation, West Chester, Pa.). PBMCs from two donors are adjusted to 2×10⁶ cells/ml in RPMI-1640 (Life Technologies, Grand Island, N.Y.) supplemented with 10% FCS and 2 mM glutamine. PBMCs from a third donor is adjusted to 2×10⁵ cells/ml. Fifty microliters of PBMCs from each donor is added to wells of a 96-well round bottom microtiter plate. Dilutions of test materials (50 μl) is added in triplicate to microtiter wells. Test samples (of the protein of interest) are added for final dilution of 1:4; rhuIL-2 (R&D Systems, Minneapolis, Minn., catalog number 202-IL) is added to a final concentration of 1 μg/ml; anti-CD4 mAb (R&D Systems, clone 34930.11, catalog number MAB379) is added to a final concentration of 10 μg/ml. Cells are cultured for 7-8 days at 37° C. in 5% CO₂, and 1 μC of [³H] thymidine is added to wells for the last 16 hrs of culture. Cells are harvested and thymidine incorporation determined using a Packard TopCount. Data is expressed as the mean and standard deviation of triplicate determinations.

[1252] Samples of the protein of interest are screened in separate experiments and compared to the negative control treatment, anti-CD4 mAb, which inhibits proliferation of lymphocytes and the positive control treatment, IL-2 (either as recombinant material or supernatant), which enhances proliferation of lymphocytes.

[1253] One skilled in the art could easily modify the exemplified studies to test the activity of polynucleotides (e.g., gene therapy), antibodies, agonists, and/or antagonists and fragments and variants thereof.

### Example 46

### Assays for Protease Activity

[1254] The following assay may be used to assess protease activity of the polypeptides of the invention.

[1255] Gelatin and casein zymography are performed essentially as described (Heusen et al., Anal. Biochem., 102:196-202 (1980); Wilson et al., Journal of Urology, 149:653-658 (1993)). Samples are run on 10% polyacryamide/0.1% SDS gels containing 1% gelain orcasein, soaked in 2.5% triton at room temperature for 1 hour, and in 0.1M glycine, pH 8.3 at 37° C. 5 to 16 hours. After staining in amido black areas of proteolysis appear as clear areas against the blue-black background. Trypsin (Sigma T8642) is used as a positive control.

[1256] Protease activity is also determined by monitoring the cleavage of n-a-benzoyl-L-arginine ethyl ester (BAEE) (Sigma B-4500. Reactions are set up in (25 mMNaPO₄, 1 mM EDTA, and 1 mM BAEE), pH 7.5. Samples are added and the change in adsorbance at 260 nm is monitored on the Beckman DU-6 spectrophotometer in the time-drive mode. Trypsin is used as a positive control.

[1257] Additional assays based upon the release of acid-soluble peptides from casein or hemoglobin measured as adsorbance at 280 nm or calorimetrically using the Folin method are performed as described in Bergmeyer, et al., Methods of Enzymatic Analysis, 5 (1984). Other assays involve the solubilization of chromogenic substrates (Ward, Applied Science, 251-317 (1983).

### Example 47

### Identifying Serine Protease Substrate Specificity

[1258] Methods known in the art or described herein may be used to determine the substrate specificity of the polypeptides of the present invention having serine protease activity. A preferred method of determining substrate specificity is by the use of positional scanning synthetic combinatorial libraries as described in GB 2 324 529 (incorporated herein in its entirety).

### Example 48

### Ligand Binding Assays

[1259] The following assay may be used to assess ligand binding activity of the polypeptides of the invention.

[1260] Ligand binding assays provide a direct method for ascertaining receptor pharmacology and are adaptable to a high throughput format. The purified ligand for a polypeptide is radiolabeled to high specific activity (50-2000 Ci/mmol) for binding studies. A determination is then made that the process of radiolabeling does not diminish the activity of the ligand towards its polypeptide. Assay conditions for buffers, ions, pH and other modulators such as nucleotides are optimized to establish a workable signal to noise ratio for both membrane and whole cell polypeptide sources. For these assays, specific polypeptide binding is defined as total associated radioactivity minus the radioactivity measured in the presence of an excess of unlabeled competing ligand. Where possible, more than one competing ligand is used to define residual nonspecific binding.

### Example 49

### Functional Assay in Xenopus Oocytes

[1261] Capped RNA transcripts from linearized plasmid templates encoding the polypeptides of the invention are synthesized in vitro with RNA polymerases in accordance with standard procedures. In vitro transcripts are suspended in water at a final concentration of 0.2 mg/mi. Ovarian lobes are removed from adult female toads, Stage V defolliculated oocytes are obtained, and RNA transcripts (10 ng/oocytc) are injected in a 50 nl bolus using a microinjection apparatus. Two electrode voltage clamps are used to measure the currents from individual Xenopus oocytes in response polypeptides and polypeptide agonist exposure. Recordings are made in Ca2+ free Barth's medium at room temperature. The Xenopus system can be used to screen known ligands and tissue/cell extracts for activating ligands.

### Example 50

### Microphysiometric Assays

[1262] Activation of a wide variety of secondary messenger systems results in extrusion of small amounts of acid from a cell. The acid formed is largely as a result of the increased metabolic activity required to fuel the intracellular signaling process. The pH changes in the media surrounding the cell are very small but are detectable by the CYTOSENSOR microphysiometer (Molecular Devices Ltd., Menlo Park, Calif.). The CYTOSENSOR is thus capable of detecting the activation of polypeptide which is coupled to an energy utilizing intracellular signaling pathway.

### Example 51

### Extract/Cell Supernatant Screening

[1263] A large number of mammalian receptors exist for which there remains, as yet, no cognate activating ligand (agonist). Thus, active ligands for these receptors may not be included within the ligands banks as identified to date. Accordingly, the polypeptides of the invention can also be functionally screened (using calcium, cAMP, microphysiometer, oocyte electrophysiology, etc., functional screens) against tissue extracts to identify its natural ligands. Extracts that produce positive functional responses can be sequentially subfractionated until an activating ligand is isolated and identified.

### Example 52

### Calcium and cAMP Functional Assays

[1264] Seven transmembrane receptors which are expressed in HEK 293 cells have been shown to be coupled functionally to activation of PLC and calcium mobilization and/or cAMP stimulation or inhibition. Basal calcium levels in the HEK 293 cells in receptor-transfected or vector control cells were observed to be in the normal, 100 nM to 200 nM, range. HEK 293 cells expressing recombinant receptors are loaded with fura 2 and in a single day >150 selected ligands or tissue/cell extracts are evaluated for agonist induced calcium mobilization. Similarly, HEK 293 cells expressing recombinant receptors are evaluated for the stimulation or inhibition of cAMP production using standard cAMP quantitation assays. Agonists presenting a calcium transient or cAMP fluctuation are tested in vector control cells to determine if the response is unique to the transfected cells expressing receptor.

### Example 53

### A TP-binding assay

[1265] The following assay may be used to assess ATP-binding activity of polypeptides of the invention.

[1266] ATP-binding activity of the polypeptides of the invention may be detected using the ATP-binding assay described in U.S. Pat. 5,858,719, which is herein incorporated by reference in its entirety. Briefly, ATP-binding to polypeptides of the invention is measured via photoaffinity labeling with 8-azido-ATP in a competition assay. Reaction mixtures containing 1 mg/ml of the ABC transport protein of the present invention are incubated with varying concentrations of ATP, or the non-hydrolyzable APT analog adenyl-5′-imidodiphosphate for 10 minutes at 4° C. A mixture of 8-azido-APT (Sigma Chem. Corp., St. Louis, Mo.) plus 8-azido-ATP (³²P-ATP) (5 mCi/μmol, INC, Irvine Calif.) is added to a final concentration of 100 μM and 0.5 ml aliquots are placed in the wells of a porcelain spot plate on ice. The plate is irradiated using a short wave 254 nm UV lamp at a distance of 2.5 cm from the plate for two one-minute intervals with a one-minute cooling interval in between. The reaction is stopped by addition of dithiothreitol to a final concentration of 2 mM. The incubations are subjected to SDS-PAGE electrophoresis, dried, and autoradiographed. Protein bands corresponding to the particular polypeptides of the invention are excised, and the radioactivity quantified. A decrease in radioactivity with increasing ATP or adenly-5′-imidodiphosphate provides a measure of ATP affinity to the polypeptides.

### Example 54

### Small Molecule Screening

[1267] This invention is particularly useful for screening therapeutic compounds by using the polypeptides of the invention, or binding fragments thereof, in any of a variety of drug screening techniques. The polypeptide or fragment employed in such a test may be affixed to a solid support, expressed on a cell surface, free in solution, or located intracellularly. One method of drug screening utilizes eukaryotic or prokaryotic host cells which are stably transformed with recombinant nucleic acids expressing the polypeptide or fragment. Drugs are screened against such transformed cells in competitive binding assays. One may measure, for example, the formulation of complexes between the agent being tested and polypeptide of the invention.

[1268] Thus, the present invention provides methods of screening for drugs or any other agents which affect activities mediated by the polypeptides of the invention. These methods comprise contacting such an agent with a polypeptide of the invention or fragment thereof and assaying for the presence of a complex between the agent and the polypeptide or fragment thereof, by methods well known in the art. In such a competitive binding assay, the agents to screen are typically labeled. Following incubation, free agent is separated from that present in bound form, and the amount of free or uncomplexed label is a measure of the ability of a particular agent to bind to the polypeptides of the invention.

[1269] Another technique for drug screening provides high throughput screening for compounds having suitable binding affinity to the polypeptides of the invention, and is described in great detail in European Patent Application 84/03564, published on Sep. 13, 1984, which is herein incorporated by reference in its entirety. Briefly stated, large numbers of different small molecule test compounds are synthesized on a solid substrate, such as plastic pins or some other surface. The test compounds are reacted with polypeptides of the invention and washed. Bound polypeptides are then detected by methods well known in the art. Purified polypeptides are coated directly onto plates for use in the aforementioned drug screening techniques. In addition, non-neutralizing antibodies may be used to capture the peptide and immobilize it on the solid support.

[1270] This invention also contemplates the use of competitive drug screening assays in which neutralizing antibodies capable of binding polypeptides of the invention specifically compete with a test compound for binding to the polypeptides or fragments thereof. In this manner, the antibodies are used to detect the presence of any peptide which shares one or more antigenic epitopes with a polypeptide of the invention.

### Example 55

### Phosphorylation Assay

[1271] In order to assay for phosphorylation activity of the polypeptides of the invention, a phosphorylation assay as described in U.S. Pat. No. 5,958,405 (which is herein incorporated by reference) is utilized. Briefly, phosphorylation activity may be measured by phosphorylation of a protein substrate using gamma-labeled ³²P-ATP and quantitation of the incorporated radioactivity using a gamma radioisotope counter. The polypeptides of the invention are incubated with the protein substrate, ³²P-ATP, and a kinase buffer. The ³²P incorporated into the substrate is then separated from free ³²P-ATP by electrophoresis, and the incorporated ³²P is counted and compared to a negative control. Radioactivity counts above the negative control are indicative of phosphorylation activity of the polypeptides of the invention.

### Example 56

### Detection of Phosphorylation Activity (Activation) of the Polypeptides of the Invention in the Presence of Polypeptide Ligands

[1272] Methods known in the art or described herein may be used to determine the phosphorylation activity of the polypeptides of the invention. A preferred method of determining phosphorylation activity is by the use of the tyrosine phosphorylation assay as described in U.S. Pat. No. 5,817,471 (incorporated herein by reference).

### Example 57

### Identification Of Signal Transduction Proteins That Interact With Polypeptides Of The Present Invention

[1273] The purified polypeptides of the invention are research tools for the identification, characterization and purification of additional signal transduction pathway proteins or receptor proteins. Briefly, labeled receptor PTK polypeptide is useful as a reagent for the purification of molecules with which it interacts. In one embodiment of affinity purification, receptor PTK polypeptide is covalently coupled to a chromatography column. Cell-free extract derived from putative target cells, such as carcinoma tissues, is passed over the column, and molecules with appropriate affinity bind to the receptor PTK polypeptides, or specific phosphotyrosine-recognition domains thereof. The receptor PTK polypeptide interacting protein-complex is recovered from the column, dissociated, and the recovered molecule subjected to N-terminal protein sequencing. This amino acid sequence is then used to identify the captured molecule or to design degenerate oligonucleotide probes for cloning the relevant gene from an appropriate cDNA library.

### Example 58

### IL-6 Bioassay

[1274] To test the proliferative effects of the polypeptides of the invention, the IL-6 Bioassay as described by Marz et al. is utilized (Proc. Natl. Acad. Sci., U.S.A., 95:3251-56 (1998), which is herein incorporated by reference). Briefly, IL-6 dependent B9 murine cells are washed three times in IL-6 free medium and plated at a concentration of 5,000 cells per well in 50 μl, and 50 μl of the IL-6-like polypeptide is added. After 68 hrs. at 37° C., the number of viable cells is measured by adding the tetrazolium salt thiazolyl blue (MTT) and incubating for a further 4 hrs. at 37° C. B9 cells are lysed by SDS and optical density is measured at 570 nm. Controls containing IL-6 (positive) and no cytokine (negative) are utilized. Enhanced proliferation in the test sample(s) relative to the negative control is indicative of proliferative effects mediated by polypeptides of the invention.

### Example 59

### Support of Chicken Embryo Neuron Survival

[1275] To test whether sympathetic neuronal cell viability is supported by polypeptides of the invention, the chicken embryo neuronal survival assay of Senaldi et al is utilized (Proc. Natl. Acad. Sci., U.S.A., 96:11458-63 (1998), which is herein incorporated by reference). Briefly, motor and sympathetic neurons are isolated from chicken embryos, resuspended in L15 medium (with 10% FCS, glucose, sodium selenite, progesterone, conalbumin, putrescine, and insulin; Life Technologies, Rockville, Md.) and Dulbecco's modified Eagles medium [with 10% FCS, glutamine, penicillin, and 25 mM Hepes buffer (pH 7.2); Life Technologies, Rockville, Md.], respectively, and incubated at 37° C. in 5% CO₂ in the presence of different concentrations of the purified IL-6-like polypeptide, as well as a negative control lacking any cytokine. After 3 days, neuron survival is determined by evaluation of cellular morphology, and through the use of the calorimetric assay of Mosmann (Mossman, T., J. Immunol. Methods, 65:55-63 (1983)). Enhanced neuronal cell viability as compared to the controls lacking cytokine is indicative of the ability of the inventive purified IL-6-like polypeptide(s) to enhance the survival of neuronal cells.

### Example 60

### Assay for Phosphatase Activity

[1276] The following assay may be used to assess serine/threonine phosphatase (PTPase) activity of the polypeptides of the invention.

[1277] In order to assay for serine/threonine phosphatase (PTPase) activity, assays can be utilized which are widely known to those skilled in the art. For example, the serine/threonine phosphatase (PSPase) activity is measured using a PSPase assay kit from New England Biolabs, Inc. Myelin basic protein (MyBP), a substrate for PSPase, is phosphorylated on serine and threonine residues with cAMP-dependent Protein Kinase in the presence of [³²P]ATP. Protein serine/threonine phosphatase activity is then determined by measuring the release of inorganic phosphate from 32P-labeled MyBP.

### Example 61

### Interaction of Serine/Threonine Phosphatases with other Proteins

[1278] The polypeptides of the invention with serine/threonine phosphatase activity as determined in Example 60 are research tools for the identification, characterization and purification of additional interacting proteins or receptor proteins, or other signal transduction pathway proteins. Briefly, labeled polypeptide(s) of the invention is useful as a reagent for the purification of molecules with which it interacts. In one embodiment of affinity purification, polypeptide of the invention is covalently coupled to a chromatography column. Cell-free extract derived from putative target cells, such as neural or liver cells, is passed over the column, and molecules with appropriate affinity bind to the polypeptides of the invention. The polypeptides of the invention-complex is recovered from the column, dissociated, and the recovered molecule subjected to N-terminal protein sequencing. This amino acid sequence is then used to identify the captured molecule or to design degenerate oligonucleotide probes for cloning the relevant gene from an appropriate cDNA library.

### Example 62

### Assaying for Heparanase Activity

[1279] In order to assay for heparanase activity of the polypeptides of the invention, the heparanase assay described by Vlodavsky et al is utilized (Vlodavsky, I., et al., Nat. Med., 5:793-802 (1999)). Briefly, cell lysates, conditioned media or intact cells (1×10⁶ cells per 35-mm dish) are incubated for 18 hrs at 37° C., pH 6.2-6.6, with ³⁵S-labeled ECM or soluble ECM derived peak I proteoglycans. The incubation medium is centrifuged and the supernatant is analyzed by gel filtration on a Sepharose CL-6B column (0.9×30 cm). Fractions are eluted with PBS and their radioactivity is measured. Degradation fragments of heparan sulfate side chains are eluted from Sepharose 6B at 0.5<Kₐᵥ <0.8 (peak II). Each experiment is done at least three times. Degradation fragments corresponding to “peak II,” as described by Vlodavsky et al., is indicative of the activity of the polypeptides of the invention in cleaving heparan sulfate.

### Example 63

### Immobilization of Biomolecules

[1280] This example provides a method for the stabilization of polypeptides of the invention in non-host cell lipid bilayer constucts (see, e.g., Bieri et al., Nature Biotech 17:1105-1108 (1999), hereby incorporated by reference in its entirety herein) which can be adapted for the study of polypeptides of the invention in the various functional assays described above. Briefly, carbohydrate-specific chemistry for biotinylation is used to confine a biotin tag to the extracellular domain of the polypeptides of the invention, thus allowing uniform orientation upon immobilization. A 50 uM solution of polypeptides of the invention in washed membranes is incubated with 20 mM NaIO4 and 1.5 mg/ml (4 mM) BACH or 2 mg/ml (7.5 mM) biotin-hydrazide for 1 hr at room temperature (reaction volume, 150 ul). Then the sample is dialyzed (Pierce Slidealizer Cassett, 10 kDa cutoff; Pierce Chemical Co., Rockford IL) at 4C. first for 5 h, exchanging the buffer after each hour, and finally for 12 h against 500 ml buffer R (0.15 M NaCl, 1 mM MgCl2, 10 mM sodium phosphate, pH7). Just before addition into a cuvette, the sample is diluted 1:5 in buffer ROG50 (Buffer R supplemented with 50 mM octylglucoside).

### Example 64

### TAQMAN

[1281] Quantitative PCR (QPCR). Total RNA from cells in culture are extracted by Trizol separation as recommended by the supplier (LifeTechnologies). (Total RNA is treated with DNase I (Life Technologies) to remove any contaminating genomic DNA before reverse transcription.) Total RNA (50 ng) is used in a one-step, 50 ul, RT-QPCR, consisting of Taqman Buffer A (Perkin-Elmer; 50 mM KCl/10 mM Tris, pH 8.3), 5.5 mM MgCl₂, 240 μM each dNTP, 0.4 units RNase inhibitor(Promega), 8% glycerol, 0.012% Tween-20, 0.05% gelatin, 0.3 uM primers, 0.1 uM probe, 0.025 units Amplitaq Gold (Perkin-Elmer) and 2.5 units Superscript II reverse transcriptase (Life Technologies). As a control for genomic contamination, parallel reactions are setup without reverse transcriptase. The relative abundance of (unknown) and 18S RNAs are assessed by using the Applied Biosystems Prism 7700 Sequence Detection System (Livak, K. J., Flood, S. J., Marmaro, J., Giusti, W. & Deetz, K. (1995) PCR Methods Appl. 4, 357-362). Reactions are carried out at 48° C. for 30 min, 95° C. for 10 min, followed by 40 cycles of 95° C. for 15s, 60° C. for 1 min. Reactions are performed in triplicate.

[1282] Primers (f & r) and FRET probes sets are designed using Primer Express Software (Perkin-Elmer). Probes are labeled at the 5′-end with the reporter dye 6-FAM and on the 3′-end with the quencher dye TAMRA (Biosource International, Camarillo, CA or Perkin-Elmer).

### Example 65

### Assays for Metalloproteinase Activity

[1283] Metalloproteinases (EC 3.4.24.-) are peptide hydrolases which use metal ions, such as Zn²⁺, as the catalytic mechanism. Metalloproteinase activity of polypeptides of the present invention can be assayed according to the following methods.

### Proteolysis of Alpha-2-macroglobulin

[1284] To confirm protease activity, purified polypeptides of the invention are mixed with the substrate alpha-2-macroglobulin (0.2 unit/ml; Boehringer Mannheim, Germany) in 1× assay buffer (50 mM HEPES, pH 7.5, 0.2 M NaCl, 10 mM CaCl₂, 25 μM ZnCl₂ and 0.05% Brij-35) and incubated at 37° C. for 1-5 days. Trypsin is used as positive control. Negative controls contain only alpha-2-macroglobulin in assay buffer. The samples are collected and boiled in SDS-PAGE sample buffer containing 5% 2-mercaptoethanol for 5-min, then loaded onto 8% SDS-polyacrylamide gel. After electrophoresis the proteins are visualized by silver staining. Proteolysis is evident by the appearance of lower molecular weight bands as compared to the negative control.

### Inhibition of Alpha-2-macroglobulin Proteolysis by Inhibitors of Metalloproteinases

[1285] Known metalloproteinase inhibitors (metal chelators (EDTA, EGTA, AND HgCl₂), peptide metalloproteinase inhibitors (TIMP-1 and TIMP-2), and commercial small molecule MMP inhibitors) are used to characterize the proteolytic activity of polypeptides of the invention. The three synthetic MMP inhibitors used are: MMP inhibitor I, [IC₅₀=1.0 μM against MMP-1 and MMP-8; IC₅₀=30 μM against MMP-9; IC₅₀=150 μM against MMP-3]; MMP-3 (stromelysin-1) inhibitor I [IC₅₀=5 μM against MMP-3], and MMP-3 inhibitor II [K₁=130 nM against MMP-3]; inhibitors available through Calbiochem, catalog #444250, 444218, and 444225, respectively). Briefly, different concentrations of the small molecule MMP inhibitors are mixed with purified polypeptides of the invention (50 μg/ml) in 22.9 μl of 1×HEPES buffer (50 mM HEPES, pH 7.5, 0.2 M NaCl, 10 mM CaCl₂, 25 μM ZnCl₂ and 0.05% Brij-35) and incubated at room temperature (24° C.) for 2-hr, then 7.1 μl of substrate alpha-2-macroglobulin (0.2 unit/ml) is added and incubated at 37° C. for 20-hr. The reactions are stopped by adding 4×sample buffer and boiled immediately for 5 minutes. After SDS-PAGE, the protein bands are visualized by silver stain.

### Synthetic Fluorogenic Peptide Substrates Cleavage Assay

[1286] The substrate specificity for polypeptides of the invention with demonstrated metalloproteinase activity can be determined using synthetic fluorogenic peptide substrates (purchased from BACHEM Bioscience Inc). Test substrates include, M-1985, M-2225, M-2105, M-2110, and M-2255. The first four are MMP substrates and the last one is a substrate of tumor necrosis factor-α (TNF-α) converting enzyme (TACE). All the substrates are prepared in 1:1 dimethyl sulfoxide (DMSO) and water. The stock solutions are 50-500 μM. Fluorescent assays are performed by using a Perkin Elmer LS 50B luminescence spectrometer equipped with a constant temperature water bath. The excitation λ is 328 nm and the emission λ is 393 nm. Briefly, the assay is carried out by incubating 176 μl 1×HEPES buffer (0.2 M NaCl, 10 mM CaCl₂, 0.05% Brij-35 and 50 mM HEPES, pH 7.5) with 4 μl of substrate solution (50 μM) at 25 ° C. for 15 minutes, and then adding 20 μl of a purified polypeptide of the invention into the assay cuvett. The final concentration of substrate is 1 μM. Initial hydrolysis rates are monitored for 30-min.

### Example 66

### Characterization of the cDNA Contained in a Deposited Plasmid

[1287] The size of the cDNA insert contained in a deposited plasmid may be routinely determined using techniques known in the art, such as PCR amplification using synthetic primers hybridizable to the 3′ and 5′ ends of the cDNA sequence. For example, two primers of 17-30 nucleotides derived from each end of the cDNA (i.e., hybridizable to the absolute 5′ nucleotide or the 3′ nucleotide end of the sequence of SEQ ID NO:X, respectively) are synthesized and used to amplify the cDNA using the deposited cDNA plasmid as a template. The polymerase chain reaction is carried out under routine conditions, for instance, in 25 ul of reaction mixture with 0.5 ug of the above cDNA template. A convenient reaction mixture is 1.5-5 MM MgCl₂, 0.01% (w/v) gelatin, 20 uM each of dATP, dCTP, dGTP, dTTP, 25 pmol of each primer and 0.25 Unit of Taq polymerase. Thirty five cycles of PCR (denaturation at 94 degree C. for 1 min; annealing at 55 degree C. for 1 min; elongation at 72 degree C. for 1 min) are performed with a Perkin-Elmer Cetus automated thermal cycler. The amplified product is analyzed by agarose gel electrophoresis. The PCR product is verified to be the selected sequence by subcloning and sequencing the DNA product.

[1288] Use of the above methodologies and/or other methodologies known in the art generates fragments from the clone corresponding to the approximate fragments described in Table 8, below. Accordingly, Table 8 provides a physical characterization of certain clones encompassed by the invention. The first column provides the unique clone identifier, “Clone ID NO:Z”, for cDNA clones of the invention, as described in Table 1A. The second column provides the approximate size of the cDNA insert contained in the corresponding cDNA clone.

TABLE 8

| | |
|---|---|
| Clone ID | cDNA |
| NO:Z | Insert |
| | Size: |

[1289] No Entry.

[1290] It will be clear that the invention may be practiced otherwise than as particularly described in the foregoing description and examples. Numerous modifications and variations of the present invention are possible in light of the above teachings and, therefore, are within the scope of the appended claims.

[1291] The entire disclosure of each document cited (including patents, patent applications, journal articles, abstracts, laboratory manuals, books, or other disclosures) in the Background of the Invention, Detailed Description, and Examples is hereby incorporated herein by reference. In addition, the CD-R copy of the sequence listing submitted herewith and the corresponding computer readable form are both incorporated herein by reference in their entireties. The specification and Sequence Listing of each of the following U.S. applications are herein incorporated by reference in their entirety: Application Ser. No. 60/179,065, filed on Jan. 31, 2000; Application Ser. No. 60/180,628, filed on Feb. 4, 2000; Application Ser. No. 60/214,886, filed on Jun. 28, 2000; Application Ser. No. 60/217,487, filed on Jul. 11, 2000; Application Ser. No. 60/225,758, filed on Aug. 14, 2000; Application Ser. No. 60/220,963, filed on Jul. 26, 2000; Application Ser. No. 60/217,496, filed on Jul. 11, 2000; Application Ser. No. 60/225,447, filed on Aug. 14, 2000; Application Ser. No. 60/218,290, filed on Jul. 14, 2000; Application Ser. No. 60/225,757 , filed on Aug. 14, 2000; Application Ser. No. 60/226,868, filed on Aug. 22, 2000; Application Ser. No. 60/216,647, filed on Jul. 7, 2000; Application Ser. No. 60/225,267, filed on Aug. 14, 2000; Application Ser. No. 60/216,880, filed on Jul. 7, 2000; Application Ser. No. 60/225,270, filed on Aug. 14, 2000; Application Ser. No. 60/251,869, filed on Dec. 8, 2000; Application Ser. No. 60/235,834, filed on Sep. 27, 2000; Application Ser. No. 60/234,274, filed on Sep. 21, 2000; Application Ser. No. 60/234,223, filed on Sep. 21, 2000; Application Ser. No. 60/228,924, filed on Aug. 30, 2000; Application Ser. No. 60/224,518, filed on Aug. 14, 2000; Application Ser. No. 60/236,369, filed on Sep. 29, 2000; Application Ser. No. 60/224,519, filed on Aug. 14, 2000; Application Ser. No. 60/220,964, filed on Jul. 26, 2000; Application Ser. No. 60/241,809, filed on Oct. 20, 2000; Application Ser. No. 60/249,299, filed on Nov. 17, 2000; Application Ser. No. 60/236,327, filed on Sep. 29, 2000; Application Ser. No. 60/241,785, filed on Oct. 20, 2000; Application Ser. No. 60/244,617, filed on Nov. 1, 2000; Application Ser. No. 60/225,268, filed on Aug. 14, 2000; Application Ser. No. 60/236,368, filed on Sep. 29, 2000; Application Ser. No. 60/251,856, filed on Dec. 8, 2000; Application Ser. No. 60/251,868, filed on Dec. 8, 2000; Application Ser. No. 60/229,344, filed on Sep. 1, 2000; Application Ser. No. 60/234,997, filed on Sep. 25, 2000; Application Ser. No. 60/229,343, filed on Sep. 1, 2000; Application Ser. No. 60/229,345, filed on Sep. 1, 2000; Application Ser. No. 60/229,287, filed on Sep. 1, 2000; Application Ser. No. 60/229,513, filed on Sep. 5, 2000; Application Ser. No. 60/231,413, filed on Sep. 8, 2000; Application Ser. No. 60/229,509, filed on Sep. 5, 2000; Application Ser. No. 60/236,367, filed on Sep. 29, 2000; Application Ser. No. 60/237,039, filed on Oct. 2, 2000; Application Ser. No. 60/237,038, filed on Oct. 2, 2000; Application Ser. No. 60/236,370, filed on Sep. 29, 2000; Application Ser. No. 60/236,802, filed on Oct. 2, 2000; Application Ser. No. 60/237,037, filed on Oct. 2, 2000; Application Ser. No. 60/237,040, filed on Oct. 2, 2000; Application Ser. No. 60/240,960, filed on Oct. 20, 2000; Application Ser. No. 60/239,935, filed on Oct. 13, 2000; Application Ser. No. 60/239,937, filed on Oct. 13, 2000; Application Ser. No. 60/241,787, filed on Oct. 20, 2000; Application Ser. No. 60/246,474, filed on Nov. 8, 2000; Application Ser. No. 60/246,532, filed on Nov. 8, 2000; Application Ser. No. 60/249,216, filed on Nov. 17, 2000; Application Ser. No. 60/249,210, filed on Nov. 17, 2000; Application Ser. No. 60/226,681, filed on Aug. 22, 2000; Application Ser. No. 60/225,759, filed on Aug. 14, 2000; Application Ser. No. 60/225,213, filed on Aug. 14, 2000; Application Ser. No. 60/227,182, filed on Aug. 22, 2000; Application Ser. No. 60/225,214, filed on Aug. 14, 2000; Application Ser. No. 60/235,836, filed on Sep. 27, 2000; Application Ser. No. 60/230,438, filed on Sep. 6, 2000; Application Ser. No. 60/215,135, filed on Jun. 30, 2000; Application Ser. No. 60/225,266, filed on Aug. 14, 2000; Application Ser. No. 60/249,218, filed on Nov. 17, 2000; Application Ser. No. 60/249,208, filed on Nov. 17, 2000; Application Ser. No. 60/249,213, filed on Nov. 17, 2000; Application Ser. No. 60/249,212, filed on Nov. 17, 2000; Application Ser. No. 60/249,207, filed on Nov. 17, 2000; Application Ser. No. 60/249,245, filed on Nov. 17, 2000; Application Ser. No. 60/249,244, filed on Nov. 17, 2000; Application Ser. No. 60/249,217, filed on Nov. 17, 2000; Application Ser. No. 60/249,211, filed on Nov. 17, 2000; Application Ser. No. 60/249,215, filed on Nov. 17, 2000; Application Ser. No. 60/249,264, filed on Nov. 17, 2000; Application Ser. No. 60/249,214, filed on Nov. 17, 2000; Application Ser. No. 60/249,297, filed on Nov. 17, 2000; Application Ser. No. 60/232,400, filed on Sep. 14, 2000; Application Ser. No. 60/231,242, filed on Sep. 8, 2000; Application Ser. No. 60/232,081, filed on Sep. 8, 2000; Application Ser. No. 60/232,080, filed on Sep. 8, 2000; application Ser. No. 60/231,414, filed on Sep. 8, 2000; application Ser. No. 60/231,244, filed on Sep. 8, 2000; Application Ser. No. 60/233,064, filed on Sep. 14, 2000; Application Ser. No. 60/233,063, filed on Sep. 14, 2000; Application Ser. No. 60/232,397, filed on Sep. 14, 2000; Application Ser. No. 60/232,399, filed on Sep. 14, 2000; Application Ser. No. 60/232,401, filed on Sep. 14, 2000; Application Ser. No. 60/241,808, filed on Oct. 20, 2000; Application Ser. No. 60/241,826, filed on Oct. 20, 2000; Application Ser. No. 60/241,786, filed on Oct. 20, 2000; Application Ser. No. 60/241,221, filed on Oct. 20, 2000; Application Ser. No. 60/246,475, filed on Nov. 8, 2000; Application Ser. No. 60/231,243, filed on Sep. 8, 2000; Application Ser. No. 60/233,065, filed on Sep. 14, 2000; Application Ser. No. 60/232,398, filed on Sep. 14, 2000; Application Ser. No. 60/234,998, filed on Sep. 25, 2000; Application Ser. No. 60/246,477, filed on Nov. 8, 2000; Application Ser. No. 60/246,528, filed on Nov. 8, 2000; Application Ser. No. 60/246,525, filed on Nov. 8, 2000; Application Ser. No. 60/246,476, filed on Nov. 8, 2000; Application Ser. No. 60/246,526, filed on Nov. 8, 2000; Application Ser. No. PT172, filed on Nov. 17, 2000; Application Ser. No. 60/246,527, filed on Nov. 8, 2000; Application Ser. No. 60/246,523, filed on Nov. 8, 2000; Application Ser. No. 60/246,524, filed on Nov. 8, 2000; Application Ser. No. 60/246,478, filed on Nov. 8, 2000; Application Ser. No. 60/246,609, filed on Nov. 8, 2000; Application Ser. No. 60/246,613, filed on Nov. 8, 2000; Application Ser. No. 60/249,300, filed on Nov. 17, 2000; Application Ser. No. 60/249,265, filed on Nov. 17, 2000; Application Ser. No. 60/246,610, filed on Nov. 8, 2000; Application Ser. No. 60/246,611, filed on Nov. 8, 2000; Application Ser. No. 60/230,437, filed on Sep. 6, 2000; Application Ser. No. 60/251,990, filed on Dec. 8, 2000; Application Ser. No. 60/251,988, filed on Dec. 5, 2000; Application Ser. No. 60/251,030, filed on Dec. 5, 2000; Application Ser. No. 60/251,479, filed on Dec. 6, 2000; Application No. PJ005, filed on Dec. 5, 2000; Application No. PJ006, filed on Dec. 1, 2000; Application Ser. No. 60/251,989, filed on Dec. 8, 2000; Application Ser. No. 60/250,391, filed on Dec. 1, 2000; and Application Ser. No. 60/254,097, filed on Dec. 11, 2000.

[1292] Moreover, the microfiche copy and the corresponding computer readable form of the Sequence Listing of U.S. Application Ser. No. 60/179,065, and the hard copy of and the corresponding computer readable form of the Sequence Listing of U.S. Application Ser. No. 60/180,628 are also incorporated herein by reference in their entireties.

The application's sequence listing, which the Patent Office published only in electronic form, follows.

SEQUENCE LISTING (658 sequences)

SEQ ID NO: 1 - DNA, 733 bp, Homo sapiens
gggatccggagcccaaatcttctgacaaaactcacacatgcccaccgtgcccagcacctgaattcgagggtgcaccgtcagtcttcctcttccccccaaaacccaaggacaccctcatgatctcccggactcctgaggtcacatgcgtggtggtggacgtaagccacgaagaccctgaggtcaagttcaactggtacgtggacggcgtggaggtgcataatgccaagacaaagccgcgggaggagcagtacaacagcacgtaccgtgtggtcagcgtcctcaccgtcctgcaccaggactggctgaatggcaaggagtacaagtgcaaggtctccaacaaagccctcccaacccccatcgagaaaaccatctccaaagccaaagggcagccccgagaaccacaggtgtacaccctgcccccatcccgggatgagctgaccaagaaccaggtcagcctgacctgcctggtcaaaggcttctatccaagcgacatcgccgtggagtgggagagcaatgggcagccggagaacaactacaagaccacgcctcccgtgctggactccgacggctccttcttcctctacagcaagctcaccgtggacaagagcaggtggcagcaggggaacgtcttctcatgctccgtgatgcatgaggctctgcacaaccactacacgcagaagagcctctccctgtctccgggtaaatgagtgcgacggccgcgactctagaggat

SEQ ID NO: 2 - protein, 5 aa, Homo sapiens
  Site (3): Xaa equals any of the twenty naturally ocurring L-amino acids
WSXWS

SEQ ID NO: 3 - DNA, 86 bp, Artificial Sequence
  Primer_Bind: Synthetic sequence with 4 tandem copies of the GAS binding site found in the IRF1 promoter (Rothman et al., Immunity 1:457-468 (1994)), 18 nucleotides complementary to the SV40 early promoter, and a Xho I restriction site.
gcgcctcgagatttccccgaaatctagatttccccgaaatgatttccccgaaatgatttccccgaaatatctgccatctcaattag

SEQ ID NO: 4 - DNA, 27 bp, Artificial Sequence
  Primer_Bind: Synthetic sequence complementary to the SV40 promter; includes a Hind III restriction site.
gcggcaagctttttgcaaagcctaggc

SEQ ID NO: 5 - DNA, 271 bp, Artificial Sequence
  Protein_Bind: Synthetic promoter for use in biological assays; includes GAS binding sites found in the IRF1 promoter (Rothman et al., Immunity 1:457-468 (1994)).
ctcgagatttccccgaaatctagatttccccgaaatgatttccccgaaatgatttccccgaaatatctgccatctcaattagtcagcaaccatagtcccgcccctaactccgcccatcccgcccctaactccgcccagttccgcccattctccgccccatggctgactaattttttttatttatgcagaggccgaggccgcctcggcctctgagctattccagaagtagtgaggaggcttttttggaggcctaggcttttgcaaaaagctt

SEQ ID NO: 6 - DNA, 32 bp, Artificial Sequence
  Primer_Bind: Synthetic primer complementary to human genomic EGR-1 promoter sequence (Sakamoto et al., Oncogene 6:867-871 (1991)); includes a Xho I restriction site.
gcgctcgagggatgacagcgatagaaccccgg

SEQ ID NO: 7 - DNA, 31 bp, Artificial Sequence
  Primer_Bind: Synthetic primer complementary to human genomic EGR-1 promoter sequence (Sakamoto et al., Oncogene 6:867-871 (1991)); includes a Hind III restriction site.
gcgaagcttcgcgactccccggatccgcctc

SEQ ID NO: 8 - DNA, 12 bp, Homo sapiens
ggggactttccc

SEQ ID NO: 9 - DNA, 73 bp, Artificial Sequence
  Primer_Bind: Synthetic primer with 4 tandem copies of the NF-KB binding site (GGGGACTTTCCC), 18 nucleotides complementary to the 5' end of the SV40 early promoter sequence, and a XhoI restriction site.
gcggcctcgaggggactttcccggggactttccggggactttccgggactttccatcctgccatctcaattag

SEQ ID NO: 10 - DNA, 256 bp, Artificial Sequence
  Protein_Bind: Synthetic promoter for use in biological assays; includes NF-KB binding sites.
ctcgaggggactttcccggggactttccggggactttccgggactttccatctgccatctcaattagtcagcaaccatagtcccgcccctaactccgcccatcccgcccctaactccgcccagttccgcccattctccgccccatggctgactaattttttttatttatgcagaggccgaggccgcctcggcctctgagctattccagaagtagtgaggaggcttttttggaggcctaggcttttgcaaaaagctt

SEQ ID NO: 11 - DNA, 337 bp, Homo sapiens
  SITE (261): n equals a,t,g, or c
  SITE (306): n equals a,t,g, or c
aattcggcacgagagctgataatatgctaaaaagcatagtgtattaaagaatgcacattgtattagaaatgtatttcagattttttccagtttttgtgtgttaaaggtcgtsctctttattccagaggtggccatccttacctgacaggcttggcagtggccggtggagcatactacctaggcctggaaggagcaatcatcggtcctattcttctctgcatacttgtggttgcttccaatatctatagtgccatgctagtnagtcccacggaattcagttcccacggccaaaccagaccccatggnctgctcagcctcagcggtgagttaaagcaga

SEQ ID NO: 12 - DNA, 147 bp, Homo sapiens
  SITE (39): n equals a,t,g, or c
agcaactagtggatcccccgggctgcaggaattcggcanagcaatattctagtttcttctatcagttatagagagggctgatctcatctgttatctgctctttgatttaaattatatatatgcacatccatatatatatttatatat

SEQ ID NO: 13 - DNA, 344 bp, Homo sapiens
  SITE (292): n equals a,t,g, or c
  SITE (293): n equals a,t,g, or c
  SITE (327): n equals a,t,g, or c
aattcggcacgagactactcacactttggactggataattctttgttgtgggggagttgtcctgtgcactgtaggatgtttagtagcatttctgacccccattccctagatgtcagtagctctccctcctctcagttatgacagtaataaatatttccaaacatttgtaaatgtccctggaggacaaaatcacactaggtttagaatcattaatttaaagcacttagcacagtacctggcacaaatcagggctcaataaatatgagctgttatttttgttcatttaatcccnnctgcagctctgtgagcttgggactgttactagcntcaatttacatatggta

SEQ ID NO: 14 - DNA, 205 bp, Homo sapiens
  SITE (173): n equals a,t,g, or c
  SITE (198): n equals a,t,g, or c
atgataaactaataaatgtagaggtaaactgctttataaagtgggcagaatcatggactgtggtctattttattctttacaagtttcaactgaaaattactaaatagaagcttattcgttgacataaatatcaagatcttctataggaccctaaattgtctagcttaatagtncttttaagaagagtgctatcatctnttaaccc

SEQ ID NO: 15 - DNA, 276 bp, Homo sapiens
  SITE (147): n equals a,t,g, or c
aattcggcacgagctccaaagtcttcatttgattgtttttctctaacttgttatttttttgagcaaacattcttgtgaactttcatatttttaatccttctttattgaggcttaaaaatatttttaaaaaatagtaaaatgtatttnctacaaaactgagcactaacttttgagaagttgttctaagctttcatttgtttctggtctgaatcatcagccacgaattctgaataaggctgatcttatattattgccacgttcaggtctctaggaata

SEQ ID NO: 16 - DNA, 481 bp, Homo sapiens
  SITE (3): n equals a,t,g, or c
ccngaataatatatttatgtgtgtgaatcattatacttgaatttgtggcaacattttgtatcaatgaatatatatgacacccaggctgactacaatggcttcaaagagtttaatttctcttaaatggactcagtatccttggaatgtgctgtttaagtgtttctgaattttctacacgccatttttacaggtccatctgtttatgatgtgatgagataaacaatcacgttgattttatgtttcttttcaaagaaaatgaatgtatatagtactaagcagatgaataaattattgaaaaaatatacttcatggatcatgcccactgataaaaatgaatttattttatttgttgaacaaactgactgttcaaattataagaatttatattgtccttattaatatgaatgccatctatttaagtgttgttcaatattgatatgtgttctctaataaaatattttaaacctctttctttaaacac

SEQ ID NO: 17 - DNA, 320 bp, Homo sapiens
  SITE (288): n equals a,t,g, or c
  SITE (295): n equals a,t,g, or c
aattcggcacgagggatttccagcctccagaatgctccttgaggtgcaactgcattacatttctactgaccagtactgtgccagattgatgaccagccaatacttgagtgtttatgatatggcagcagctgtttaaccacctaaaagtactgtagacctagcatacccacacttcctataagaaagatacggctaagaccgcaggcatggtggcatgcagccggtagtctcagctacttggaaggctggagcggggaggaccacttgaacccaggagatcaagactgnacccttncacatccaggattatattcttgggg

SEQ ID NO: 18 - DNA, 219 bp, Homo sapiens
  SITE (213): n equals a,t,g, or c
aattcggcacgaggtgatctcttatttcacagtataccacctttagwgatattaatgacttwcttggttatcatttgatatgtaaataaactcatattttaatgaaaataataaattactatycttgtgatcttagtgstcatcaaaagtagaacttagaccattcagtttacagctaatcttccagattgctaaatgaaataaaattatttncctatt

SEQ ID NO: 19 - DNA, 319 bp, Homo sapiens
gaggtgtgaccaagacagattccaaccactcactcacagatcccacagcctaccagggaagccagatatggaacaattatatacgtaattttacttgtaagtgccacaaagacaaattgtattaagtagtaccatgtggctgtggaagtttaacttgtcactgaatccaccaaactctgagaagacagcatattttccgtgcattcccaaaagactatgcacaggcaacattgaggaatgctttgttraaacttccaggggwkatattccacatgcacacttcccccgtgccaccaggtttaggcaactgtccaaggac

SEQ ID NO: 20 - DNA, 140 bp, Homo sapiens
  SITE (22): n equals a,t,g, or c
ccccagcccaaccccttccgcntccccctttcgcctcaaagcggccgmcaactgcatgtcctggtactgcaatgccttcatcttccacctggtttacaagcctgcttcaagggagcggggcccgaccggtgttcgggccc

SEQ ID NO: 21 - DNA, 990 bp, Homo sapiens
  SITE (984): n equals a,t,g, or c
aagatgccagcacaaaaattcgagaaatcttccaccatgcgggaatccacaatgtgaccatccagtttgaaaatgtggacttgaaggaacccctggagcagaaggacttactgttgctctgcaactcaccctgcatctccaagggctgtgctaagcagctgtgttgtccccccggggcactgcctctggctcacgtcaatggctgtgctgagcaaatggtgggccctctctagacacatacggaagtgatggcctcagtagaagagacgcaagagaagtggctattgaagtgtctttggatagctgtctgagtgaccacggacaaagtcttaacaaaactcaggaggaccaatgttatgtcaacagaacgcatttttaatctggtactcacataatcagaccatatagacgaggcactttggaaccacaagcttggctcacaaaaagagctttctgggttgtaggcccagactagacttgcagcatgcatgctctgtgttcactaggggttggctgtttgggattttagttaaacgtgtctgtgaatttttatgtaactaactcctttccattcccctgggtgtctcatgctgctctttgactgtttcagcttgaacatgcattttctaaagcaaactgcactagtgtatatatcagggacattaaagtctgggactggggctcaatagctgcggatacagtgttcaaagaagttcttgtttctaaactgattagaacttctagctaatgctcaggtgagatcatagcttaaatacattgaaaaaactaaagtaccacaatagctgtatttttcccaatccccttaacgatcataaaagaggcaagttaagtatttctggcactgaagaaatatcttttttctttgattcatttttgaataaatataaaatgaataactattaaggtagaaaatattctcagaacattctagaggaggtaaaggtagtaggagggcgtggccancccacc

SEQ ID NO: 22 - DNA, 402 bp, Homo sapiens
  SITE (330): n equals a,t,g, or c
  SITE (349): n equals a,t,g, or c
aattcggcacgagctagaaatgaaaactgttgtcaatctgtaatttatagaaaatttatgtaagaaaacttatgttgtcttttaagcaattctcctgcataataacttagtttagagtaagaaatatgcatcttatctaaactgatttatagaccacatgctatttttacaaatatttaagaaaattcctagataaactttggaaccaaaaacaatgtagcctaataacaatgtcaactatacttacagtataattttatatataaccttttatctttataataataaatrctatcacagccatttagrgraggcawttttagtttaccnctattgcttaaaggyttantattatttatgcacaccaggattctgctttttaaattagtttaaaatttggtc

SEQ ID NO: 23 - DNA, 364 bp, Homo sapiens
  SITE (199): n equals a,t,g, or c
  SITE (341): n equals a,t,g, or c
  SITE (362): n equals a,t,g, or c
agggtcagggccctcactcacactgctggaaggttaaagtcgacttcacgctagtttaaggaaatagctgacgctgataaccatgtcccaagcactgctctaagttcccaatgtgtccggaattggtgggttcttggtctcactgacttcaagaatgaagccacggaccctcgcggctggagtgcagtgacatgatctnagctcattgcagcctcaacctcccaggcacaagcgatcctcctgcctcagcctcctgagtagctgggatacagacggtgactcaatctgcccaggctggagtgcggtgacctgaacacagctcactgaagccttgacttccngggttcaagcaattttcctgnct

SEQ ID NO: 24 - DNA, 464 bp, Homo sapiens
atccctcgtatacactattcttctgtgcagttgacacttgaacaatgtgggtttgaactttgagagtcaatttatatgcagatacttttaaataaatatattgcaaaatattttagagatttgcagcaatttgaaaaaactcatagatgaaccatgtagcctagaaatatttttaaaaatttagaaaatsttaggtatgtcataaatgcataaaatatatgtacatcttagttttatcatttgctaccataaaatatacacaaatctatttaaaaagttaaaatatcagaactttacccacacagagacgtgacatggcactatttacagtagagagaaatataaacaaacmtaargttgcagtattaactcataactacataaaattaactttagtacatgcygtgrtagrkttttagccacctcctgttttttactggkgttggamctcmaatgttgcggat

SEQ ID NO: 25 - DNA, 318 bp, Homo sapiens
  SITE (146): n equals a,t,g, or c
aattcggcacgagggaagctcatgctagtktcttacctgttgataaggaaatgagttaataatatcaccagcacatttcagggtggataatcacttgccaaatgttgggcaaagttttgctcccctgaatgtagcccggcaggagngctgagagagctaacccagctagaggtaaagacgggaacgggccctgccgtgagatgccctttctgtgcccccactccaaggcagctgcctttctggtgtccttgtacaccctgtatacagttaccacatcccatggsacctgttttttwaagttttgttttctctggatct

SEQ ID NO: 26 - DNA, 465 bp, Homo sapiens
  SITE (52): n equals a,t,g, or c
  SITE (440): n equals a,t,g, or c
  SITE (462): n equals a,t,g, or c
aattcggcacgagccctggcagccatccaaaatttgcctccaagagcatgtntcacagacaaaggtctgtgttttatggaactgtgctgacgggctctgcacacatctcactgggctactctccctggtcccagcctgcccagatcaggcgcaaagtaacatgtgagtcagaagaggttctggaggaagttggagaaggctccagaagtggcctcatggaatgcggccccatctatgccgcatatgttttactgcaagctcatctccagccaagacttggctccttctctgatgcaggaaacctatcgccagtgcaggtgcctttaatgtttctctgagaaaggaggaaatgctggttgtgctgtcggtaagtcccaaggtgcatgtattagcaggaggacagcaggactttagagaaggatgtgtctcttctctttgtnctgagaagtagagagaggcctnaat

SEQ ID NO: 27 - DNA, 430 bp, Homo sapiens
  SITE (321): n equals a,t,g, or c
  SITE (324): n equals a,t,g, or c
  SITE (393): n equals a,t,g, or c
  SITE (397): n equals a,t,g, or c
aattcggcacgaggagaaagttaagagggaaattagtgtactatagagatcagtagtagagaggggcctggcgggatggctcacacctgtaaccccagcacgttgggaggccgaggcaggtggatggcttgatctcaggagttgaagaccagcctggcaacatagtgagaccccatctcaattgtgaaaaatcatattaaatttaaaaagacagtgacaagggaaagggtctttcctgtttcccttcagtcatttacaacattttacaaaacactataggtaagaaagaaggcaaatctgtaatcagggaaaggagggttnctnctagctaggtgaaagttgtgtgtcatgtgactcaaccccatgatcacattgcttcaagtggtgtagagnttcntcagtttaatttttgaattacttggttgttttg

SEQ ID NO: 28 - DNA, 415 bp, Homo sapiens
  SITE (305): n equals a,t,g, or c
  SITE (392): n equals a,t,g, or c
  SITE (396): n equals a,t,g, or c
aattcggcacgaggacacagttcaaaagaatttgcctttgattctcactaaaatgtaaagttttgcatattaagatcctttttcaacaactgagcaactctttataatgaagggcagaagacgccaaagggaagaaaatatttacctttgtgggcttttactttctttcctgggaatggtaggccatagctattggtatgtttttttttgttgttgttgttgttgttgttgttttttgagaaggagtctctctstgtcgcccaggctgtagtgtagtggcatgatctcgactcactgcaaccttnacctcgggttcaagcgattcccctgccccagcctcctgagtggctgagattacaggcaccaccaccaggcccggttaatttttggantttnagtagaacggggtttaaca

SEQ ID NO: 29 - DNA, 854 bp, Homo sapiens
  SITE (805): n equals a,t,g, or c
aattcggcagaggttcttttcccagccatgccccttggtaaaagggataaatgtgggcacctcctgtaacgtctccaagcttccctttcctctctaattgagcaaggatgttataaggctctaaccacaaccttcttgggaagattcagtgagataaagcatgcaaagttcttagtcccatgccaggcatgtgattagctctttggatttagacccgagtttttttctcttggctgtgattctctttgtgccacccacacagccccctggtgctttggggaccttgaagagcccagagggtagtgttagacccagataacccatcccgatgctgatacccggatgcctgggtttacccagcgtaggtttagtatctgctccctccctgtctcttggggaacggttcctactgtatattaaaatctaagttgtcaaggtaaaataagccgcttatttctgctttttcaaagttcaatttcattcactttttaaagtattaatatttgtttctatcaaagtaatagatgacatcatktaaaagtcaaatggttccacaaggstgattatgacaaacagcttcctccctgcaactcctgccacttgcaacagttttagctgtttcttctagtatttgsctccatatagataaataattgacacagggcattattccttgattgattcacttttaggttgttgarttcctgttaaaaatggatgaagacggccaggcacagtggttcacacctataataccagcactttgggaggctgaggtgggaggatcacttgatcttaggagctngagaccagcctgggcaacatagtgagatcccatctctacaaaaaacaca

SEQ ID NO: 30 - DNA, 457 bp, Homo sapiens
  SITE (387): n equals a,t,g, or c
aattcggcacgagggaagatatcccggaaacaaggtatcccccaccccctgccccagcaggaagcagtgtgaggtcgtccctcccagcctctcgctgtcctttctagccctgggcttggtgtccatggggaccctcgtggaccacctgaggcagggattccttggtgtctgcaggaagcagagctggtccatggaagctcctggctctctctggcctttccccatcccatcaatccctccccatcccatcatcccttctttctttctgcttccacaggtgtcatcaagctgaagaacaacggtgatttcttcattgccaatgagggtcgacggccatctacatcgatggacggccgtgtctgtggttcaatggggctcagaamaatntgtgtggagtgagttgggagagcagaaggcagtgagactagggtgtgagcataaacaattgtctgtgcaa

SEQ ID NO: 31 - DNA, 349 bp, Homo sapiens
  SITE (316): n equals a,t,g, or c
  SITE (325): n equals a,t,g, or c
  SITE (343): n equals a,t,g, or c
aattcggcacgagtttacccctctctgtagagtaatgtagattgtttaccttacatctcatgttatgggtattcatagttttttttaattgttattgtgaatgacatttttttctattttctgactcatatttgctgacatacttgaaagataatgattttttaaaatatttatatgaaatccgagccctttattctcaataattgtaagaattgattttatggagctttttgatatctaataatcatatctatgagtaatgaaaatttactttcccttcctacatgttatgtctggattggctagaattccaggnaatgttacnaataatgttaccatgggngtcctt

SEQ ID NO: 32 - DNA, 376 bp, Homo sapiens
  SITE (332): n equals a,t,g, or c
  SITE (343): n equals a,t,g, or c
  SITE (346): n equals a,t,g, or c
agggtcatcttactctttttaagtcatggacaaaaagacagacacattgccctgtaactttcagatcttctgtaacctttttaaacaacataggagagaagttggtacttgtacccaagggaagagaagttagtgagtagaaaagacagaatttatttaggaaaacgatggaattaagctctggacaaaacatgcatcagtgrtgcatraacatttttgttaattgggtcttaacaggtttctgactccatatggtaatcattgtaggaagtggggtcttactagaccacgccrgggaaaatcgcggagtgktaagaactcttacctccccngtgtgtgtgcnccngagttttttggggggggcggtacgttttct

SEQ ID NO: 33 - DNA, 443 bp, Homo sapiens
  SITE (375): n equals a,t,g, or c
  SITE (380): n equals a,t,g, or c
  SITE (403): n equals a,t,g, or c
  SITE (433): n equals a,t,g, or c
accattatctggcgggtacgagcgacaaaatcatcacgctgggtatcggaaagcagcgccgccaccacaccaacggtacgcgaggcattctgcacatacaccgtcgggccgctgtagttctgctcgattttcaccgccgtgtgcgcttttraggtcgtcgcgccgccaatcagtaacggaatagtgaagccctgacgctccatctctttcgccacgttaaccatctcgtccagcgacggcgtgataagccccgaaaggccaatcagatcagcattcacttctttagcggtacggagaattttttccgcaggcaccattaacgccgagattcgacaatttcgtagttgttacattgcagcaccacaccaacgktanttttnaccgttgttcgtgggacgttcgncctttcaaggtggcgwtcaacattttgccnttggtttttg

SEQ ID NO: 34 - DNA, 206 bp, Homo sapiens
  SITE (120): n equals a,t,g, or c
ctgcagatgggggtgctagccttgaaagttgggtgccccaagggttggggcaggagggcaaggggccgccccagggaggtggtgcatgacacagcctataacaggcagtgactcactctncatccagccataaagtcaggktgataggctcagtgtyccagccgtgctcccttggagtccctgccccaacggtcattcccttcttt

SEQ ID NO: 35 - DNA, 448 bp, Homo sapiens
  SITE (288): n equals a,t,g, or c
  SITE (392): n equals a,t,g, or c
  SITE (415): n equals a,t,g, or c
  SITE (419): n equals a,t,g, or c
catattgtaaatacaacggtgttctaaaatttagaataaatgaaaaatgaataaaatgttgctttaggggatataatccttcagaaaaattctttgatagtatctgattatttcacagttagttttgggaataatattacagatacagtcatttttgcaaaagtatttgagcacttcatcagttttctctgtcttttgacatgcagatctttcttttctgaagtgcctcgtatcatcatccttgtcaattttctttcttcagttgtcttctggtcctgctctctcagntcctcatttaacagcggctttgctgtaattttagcatctccctaatatcacttccactgactcatgaaatctacatgtttgccagttttgcaaatttgctaggntctaaattttttttaacgggtgntacntttccagacaggtcaacacgtgggcactg

SEQ ID NO: 36 - DNA, 269 bp, Homo sapiens
  SITE (77): n equals a,t,g, or c
  SITE (157): n equals a,t,g, or c
attactcataagggacaagtgggtccacgtgcgccgttgatagkgtccggtgcagattgcaggtctacgtggataanattattatggtttaatctgtatgatttagttttttgttgttctttttgcaaatactgttgggagccgaaacctctcgttnatgatgacggcagcacataggggtagagcattcagcactgcgtggttttaatttaaatgcggcggacacgagagtgcagttcgtacatattgggtgaacagatcagtcagca

SEQ ID NO: 37 - DNA, 278 bp, Homo sapiens
  SITE (89): n equals a,t,g, or c
  SITE (223): n equals a,t,g, or c
gcagctgaattacctcataagggacaagtggagtccacggtgcgccgtctagactagtggtccggtgcagattgcaggggaacagtatntgggagttttatacaatcaatggacaaccatggagtctatgtggtcaacactatgtgagatgcatttctgmcagaatcagcgcatatggccacattatgcagttasggcggcgcgagtgagggaatctctgagnttagagtggtgccaggttggatctgaggctcatttacatgtgacgggtgatgttc

SEQ ID NO: 38 - DNA, 222 bp, Homo sapiens
  SITE (209): n equals a,t,g, or c
atgttgttttatgtatttgaaaatctctttaatgtacggcttcatcaaaggcagctgaatttgcttatctgcctttatccttagtgtatctcagtaaatttggttttggttgaagtaggtaargaaaaccctgctggcctaatacagatacataggttaaaaagggacgactattttaatagttgttcaggcaattgtgggatatcctntttgatgttacca

SEQ ID NO: 39 - DNA, 528 bp, Homo sapiens
  SITE (496): n equals a,t,g, or c
  SITE (504): n equals a,t,g, or c
  SITE (520): n equals a,t,g, or c
attcccgtgttcacggacgggagtaggggccaaggtatatccaaggatggcgcacactgagtgaaatgcgaggctgctcaaaaggtgtaggagaatcctgcctgctgggctgtgagtaaagggccctggaccaccccgttgttcccactttctgtggttaaggggcgcatcgagtggcgaaggagagagcccagtgaactaaacagccctttaaaagttcgctttcttctgctggcgctctttctagcactaactttggtatgcatttaatctgtaaaattagtactatcaccttacgttggagtagcactttacagtttgactctagatgctcttttcattccatcctgctacctactcacatcaagtgcttttccccttgaccaacggtatgccaatctgctgataattacttcgggtattcactggaatttctaaatctcaagggctcagtgaggcaggggtagtctgtaggggaggggattagttagggggnatgccttnccaaaggggggttttngagctggg

SEQ ID NO: 40 - DNA, 320 bp, Homo sapiens
  SITE (275): n equals a,t,g, or c
ggcacgcagcttgtcaaatagggaatggtattcatcctaccttatttctgttcatcctagagacactatagaggggrtgcttttaggtacaggttaaaatcaagtaactttttggcatccttccagatctaaggttctgaagatctttggtacattttatttaacaaaaaatgttgatgcccaagttttctggattagttcaagtacacctgtaatacaggtggcctcctgtgtggaatgcccttcccactcctgccctgccttacttgctcctncttcttacctcccgcagaagcactgtcagggcatcaccccccagt

SEQ ID NO: 41 - DNA, 305 bp, Homo sapiens
  SITE (24): n equals a,t,g, or c
  SITE (278): n equals a,t,g, or c
  SITE (285): n equals a,t,g, or c
ggcacgaggtttcgcggccagagnttacaggtccaggtggagaggccgggctggccagggcttcggcctccggcgtcgggaaatggcggcggggggcaggatggaggacggttccttggatatcacccagagtaattgagactgactgaccacctgacaagctgccacggggaactgcagcttttgctgaatagcattttacagtgtttgttggaaacctggaatttggttctggacttctgtggctgtttaaaatatagggcttgtgggtcacttgnaaaagtnacctgttagaagcccgggat

SEQ ID NO: 42 - DNA, 417 bp, Homo sapiens
  SITE (335): n equals a,t,g, or c
  SITE (376): n equals a,t,g, or c
  SITE (416): n equals a,t,g, or c
ggcagagccaacacagatgcacctcttcctttcctgcattaagcaaatgatgctccgatgcttctaggtctctccaccactgcaaaatgctcagagaagtggagggattgaaaaggaagttgcctactactctgaaggatactggaaagtcgccttcaaatctaaagtgaagacttgggggcgggggatgcccctttcctgaagagggaatgagggtccctccccttaaaaaggagcctctgttcgggtgaaggcgatccccaccctgaaagagaggcgtgtatgtgggaaaggtggtgggaaggttgtaccctgaaagaggagcctggatttgnaaggaaatgttcccaattttgaaggggggagacggaatttncgttctgttcggcccaggttagagttagagtggagtggant

SEQ ID NO: 43 - DNA, 290 bp, Homo sapiens
ccatcctccaaacatctgsaagccccccatagcaaactcctcttggaaattggtggttccctgtctgacccaaatgctaggccgatttcaacccttctccttggtccggagtttcagactgggatttgaagcctgctgctatccaaaccaaaaatgtgctactcagaccatcagaccccctgactccaggtgcctagtccaagcagtttytcagaacttwaattttgcaaaggatgtgttggatcagtggtcccagctggaaaaggacggactcagagggccttaccccg

SEQ ID NO: 44 - DNA, 379 bp, Homo sapiens
  SITE (335): n equals a,t,g, or c
  SITE (365): n equals a,t,g, or c
ggcacgaggtgcactctcttgcacagcctattcctgtaccagggtatccccagcgccaccctgcatggccctagccccatggatcagatggccccttcccagccttctcactgccctgttacctcctcgatattcctgtccatcctccctccccctaattgttagaggtgagctggccctaggtgtgaacaaggggatcggcttaaattccttttggtacagctcttttaaagagaccccctgcttcgggggkttttgtgsaggatggaaatgatttaaaaacatgttttwytataattaccattgtggaacttataataacagtaggtgtttantaaacatcccacaggggacaacaggaacanttggggggacaaag

SEQ ID NO: 45 - DNA, 301 bp, Homo sapiens
gagccacagtgcccggcccgaaaagtctttattacatacccttgaactaggcactggagaaaagttctattagtcttcatctactttatgttctgaagctaaaatcagggtttatgctcttgccaacaagtaaaatatttagaattcagacttgtctagaacattagagatgtctgggcatagttgatcctaagatccactgaatgtataagctagtagctgagactagatttcttcataaaaagatgagtagggcatccccggcttagaatcaaatgtgtggtccagatggcagtatagg

SEQ ID NO: 46 - DNA, 459 bp, Homo sapiens
gatggtaataaaaataccttcaggccttttggagttagtagaaaaatactgtagtttttagacagaaacgtctggagggctaagatttagattccgacattccagtttgatcaaaagcagctgacattatcatcattgcaactatttataaaatgctcgttgtgggcagatactgcaccaggcacttcaggaacattcatcttagatgaacttcaaagtaacctctgatgtagtgttctgtcatccccaggtcttggatgatacaagtcaggattagtatgcctgaggtcttttggccttggatcaaactgggatttgaacacacctctgtccacccctaggcctgtgttcttaggcaccataatgttgtagcactcacctgtgaggaatggatttttttcattgccttggattttttcatgccttgaatattttcagatatgaaaaacattgtcactg

SEQ ID NO: 47 - DNA, 454 bp, Homo sapiens
gggctgcacctgaagcatttggtgggtgagcagcatgggctttgaggagctgctggagcaggtgggcggctttgggcccttccaactgcggaatgtggcactgctggccctgccccgagtgctgctaccactgcacttyctcctgcccatcttcctggctgccgtgcctgcccaccgatgtgccctgccgggtgcccctgccaacttcagccatcaggatgtgtggctggaggcccatcttccccgggagcctgatggcacgctcagctcctgcctccgctttgcctatccccaggctctccccaacaccacgttgggggaagaaaggcagagccgtggggagctggargatgaactgscacaktgcctgstytyagggytgggagtacgaccactcagaattctcctctaccattgcaactgagtcccaggtcggtatttacataatccatct

SEQ ID NO: 48 - DNA, 608 bp, Homo sapiens
aacattttcaaataaagtggaagccaagaatgcaatcaagcaacttaataattatgaaattagaaatgggcgcctcttaggggtttgtgccagtgtggacaactgccgattatttgttgggggcatcccaaaaaccaaaaagagagaagaaatcttatcggagatgaaaaaggttactgaaggtgttgtcgatgtcatcgtctacccaagcgctgcagataaaaccaaaaaccgaggctttgcttcgtggagtatgagagtcatcgagcagctgccatggcgaggaggaaactgctaccaggaagaattcagttatggggacatggtattgcagtagactgggcagagcagaagtagaagttgatgaagatacaatgtcttcagtgaaaatcctatatgtaagaaatcttatgctgtctacctctgaagagatgattgaaaaggaattcaacaatatcaaaccaggtgctgtggagagggtgaagaaaattcgagactatgcttttgtgcacttcagtaaccgagaagatgcagttgaggctatgaaagctttaaatggcaaggtgctggatggttcccccattgaagtcacccctagcaaaaccagt

SEQ ID NO: 49 - DNA, 523 bp, Homo sapiens
  SITE (394): n equals a,t,g, or c
  SITE (417): n equals a,t,g, or c
  SITE (425): n equals a,t,g, or c
  SITE (495): n equals a,t,g, or c
  SITE (508): n equals a,t,g, or c
gaggaggggcaggagggagcctggactttggaggatggggaaggcaggccagggcccggagtgggtgaagacttctcaggactaggccaggacagtgcccatccctgcagaagcccagtggccaattgaggcaggaggagctccagacaacagcatgtgaggcaggcgtggattttgtgtacaagacaaagctggaatctgtggaggtctctgcctccaacccttacgtctattacaacacgcagctcgaagacatcattaagagtggtacggaccctgccacacccctggccatgaagaaattcgtctcccatgccamttgccatgactccctggggttkgcaagaacaggaatcgtacctccatccatgggccagaagtcagaactgtgganaatcaatcttgattacagctatnttcttggnaaggaaacttccccctccctttgggcagcaaatggaaatgccagcagaaaaattgggggacaatggaganttttgggattttncgaccccggtgcatc

SEQ ID NO: 50 - DNA, 314 bp, Homo sapiens
  SITE (308): n equals a,t,g, or c
gccatctcctttcccatatggttttgcattgcctctaaacttttacgttttcatttacatagcttacctagatgatggcatgaccctgtggataagagtctgggtctcagagtgagattgcctgggttcgtatctgagttcttttacttatcatctctgggcctctgtatttgcattatacatgggaactaataaaaatatctgtctcataagataaggattcagtgagacaatccaggtaaatcacttaacctagagcccagttcgtggtaaagtgctggtagaatgcaccgttattgttggtgctncttcgt

SEQ ID NO: 51 - DNA, 294 bp, Homo sapiens
  SITE (260): n equals a,t,g, or c
  SITE (267): n equals a,t,g, or c
gatggagaaaaatttcaaattctggtataaacaaataatctaaaaatatagataaggaaaaaatgttttcatttttttggtcatattgatttgggtcatatatgattgaccaaaaaaaaagatatttctaaaatcctggtgctttttcatttaaaaatagacaaccaaagaggaaaatgaacaatgatggaaattcgtggaagaggaaactaaaatggcaaaatagcatattaaatggcactgagccttggtgtgatcanaaaaaanaataaagcaaaatgagatattactgct

SEQ ID NO: 52 - DNA, 700 bp, Homo sapiens
  SITE (611): n equals a,t,g, or c
  SITE (647): n equals a,t,g, or c
  SITE (672): n equals a,t,g, or c
  SITE (694): n equals a,t,g, or c
gtgggagttggtctgggaattttcttagtggcagaaagtcactttggcctcttaggtttgctagagaacaagtttaaagtggatagttcaagctattttccaggagagaagggcttgctgtataccatttcacagagctggtgtgtgagcccccacactaatctgaaagctctaaagggcgtccttgtgtctctgtccaccccaggatgcctgatgaacacacagggcccaatgaatgaaggtacattcagaatctgttcaacaccttgctctttccagggcagtgtgaatccttcctataacatatggcaaatcttgctacaccatcgagggaaacttttgaatgcccattaactctttcgcatatttagaatttcattgacaaatgaactgctctggggaactgaacaatctctttgcagtaggaaggtgttggtgtgcattgtgaaatgtctaatgttgctgtagaaaaatcttgcatcacttaggagcatcagattcagcatttttcaggtatgttgtagtgagttaagttgtagtgataagcccagggatctgtttcaacctagaaatactggttagtatgaggtccagctcgggggccaaagagnaaaagtccatgtggcaatgcaggttagaaaacatcnccagattccccgccgagcatgtttnatggaggcccgttttaagttgncaatgt

SEQ ID NO: 53 - DNA, 329 bp, Homo sapiens
  SITE (61): n equals a,t,g, or c
ctccacctcccgggttcaagcgattctcctgcctcagcctcctgagtagctgggattacangtacaaccacagggctccccatgaggtgatgtcatcgaattttcctggctgaagagtcgtcctttgtgtacacacatgggagtttattttttcatctgcatatggacgcattcctgagacttcagaaacattctatggagaattgagaagagagtattttttgagccagaaagtgcttccctgtgaagtttgtatatagagagagagagagagaggagagagagagaagagcccaactgtgcactttctcaagagaaaacctgtatca

SEQ ID NO: 54 - DNA, 451 bp, Homo sapiens
  SITE (435): n equals a,t,g, or c
  SITE (436): n equals a,t,g, or c
agacagtataaagataagtggttgtcagagtttggtggcagggagggggcaagtgatgaatatggtggagcacagagaatttttaggcagggaaaatatgtagtggtagatacatgtcattatacagttgtccaaacccgtagaatgtacaacaccaagaaagaagtctaatgtaaactgtagactttgaatgagtataatgcatgaatgtaggttcatgtattgcaacaaacatatcactttggtggggggtgttgataataggggagtaggtaatgcatgtgtaggaacagtgagtatatgggaaatctctgtgccttcctcttaatttggctgtgaacctaaaaactgctctaaaaaaataaaatttttaatttagaaaaaataaatagaaaaaaggaataattaaggttagaatggcaatcagtaaaatannaaaaaaaaaaaaagg

SEQ ID NO: 55 - DNA, 524 bp, Homo sapiens
  SITE (393): n equals a,t,g, or c
  SITE (421): n equals a,t,g, or c
  SITE (450): n equals a,t,g, or c
  SITE (487): n equals a,t,g, or c
  SITE (520): n equals a,t,g, or c
attgggtgaagatgcttctcaccaacactttagaagttctataaaataaatgtaaaaaaagaataaattacattataatgagccatgcatgtcttrgtccattcctgctcccataacaggatactgtagactgagaaatttrtgracaacagaaatttgtttctcacagttctggaggctgcaaggtccaatattaagatgtcagcagattcagtgtctgataaagtcctgttactcataaatggcacctctgtatccttacgtggcagagaaggcaaaaaggacaaactcactcccccaatcccttctataaggcactaatccaattaatgagtgatgtaatcacttctgaaatttttgtgcccctccccccaccaaaaaattaaarattanaaaaaaataacaaagttgcattgggggnatttaaatttccaatatggaattttgggnaagggtccaaaccattttcaaaccattagccacatgncctaatttattaatccataggggttattaattnacct

SEQ ID NO: 56 - DNA, 538 bp, Homo sapiens
  SITE (521): n equals a,t,g, or c
  SITE (534): n equals a,t,g, or c
accaatcccacctccttcattacctcctggccatgattctcctgggagataattctgctctctggagatgttggtaggaaagtttcaagttacgcagctgagaaacagggaccaaatagtgctcctgggtgcattgtcaccgtgggtggccactcaagggtccaagcctctagggccatccttgggctaacaactggggtgggtgtgagcaggtggaaggagcctcagcccatgccattacctcctgcttccttatcaggctgtgtgttaattctgggccagtctacaccctcccacggggtggaaatggcctggaggatgtgagggcacccctcctctgaagatccctgtacacgtggtgttgggactggaaccattatgcggccccataggcctcaggagtcatcccagaagcagtggctgggaggtggtgtcctaagtaaggatctgtgcagaggacaaataaatcagtttttgatttgtcttgaaaaaaaaaaaaaaaaaaaaaaaagggcggccgntctagaggatccntcga

SEQ ID NO: 57 - DNA, 265 bp, Homo sapiens
  SITE (262): n equals a,t,g, or c
  SITE (264): n equals a,t,g, or c
atttggagaagataataaagcactggttctcttttattgttaagatctcagctgatgtgggaacattgtgattgcactataaattgctaaagtgaagaagagaacaaataacttcatttatttattttgtttgttttttagacagagtctcgctctgtcacccgggttggagtgcagtggcacgatttcggctcacttcaacctccccctcccgggttcaagggattctcgtgcctcactcagcctcctgagtagctggggntnt

SEQ ID NO: 58 - DNA, 252 bp, Homo sapiens
tttcacagtactagaatcttgcaatgttcagtatacttgctcattttaaaaatggctaaattatataccttttatttgagctcccattcccacatggggctagaactcaacttagatgtattctttgtggcttagtcttggtgctgttttgccattcaccattttcatgtaggctgtttaaaaaacagacagtgtcytcagttgagtgagttttacttcctgaactgattttttttactgtattaactaaag

SEQ ID NO: 59 - DNA, 398 bp, Homo sapiens
tcttcctgagtaattaaatggaccaacaatgagcctttgcaaaattttcaagcggaaattttaaggcacctcattatctttcataactgtaattttcttagggatcatctctgttaaaaagttttctgtatgtcatgttataattacaggtcaattctgttaatatctttttgttaattttgctctatgtttgcctctgaaggaggtgagatttgtgctactttgggagattatgttcttttttcatgtctaagatttattttgatcatgtttataatataatggtaattcatttttgatgttttgtgaagaatttaaatttaaacgaatgttcttaaatcaagtgtgatttttttgcatatcattgaaaagaacattaaaagcaatggttttcaaaa

SEQ ID NO: 60 - DNA, 787 bp, Homo sapiens
  SITE (313): n equals a,t,g, or c
tgaccaaggtggtaagccagcaacccttcgtgggctaccgcggcccccgagagctgtcggaacggaagctggtgcgcaacgtgcggcaatcgggcgacgtttactacaacaccggggacgtactggccatggaccgcgaagcttcctctacttccgcgaccgcctcggggacaccttccgatggaagggcgagaacgtgtccacgcacgaggtggagggcgtgttgtcgcaggtggacttcttgcaacaggttaacgtgtatggcgtgtgcgtgccaggttgtgagggtaaggtgggcatggctgctgtgcantagcccccggccagactttcgacggggagaagttgtaccagcacgttcgcgcttggctccctgcctacgctaccccccatttcatccgcatccaggacgccatggaggtcaccagcacgttcaaactgatgaagacccggttggtgcgtgagggcttcaatgtggggatcgtggttgaccctctgtttgtactggacaaccgggcccagtccttccggcccctgacggcagaaatgtaccaggctgtgtgtgagggaacctggaggctctgatcacctggccaacccactggggtagggatcaaagccagccacccccaccccaacacactcggtgtccctttcatcctgggcctgtgtgaatcccagcctggccataccctcaacctcagtgggctggaaatgacagtgggccctgtagcagtggcagaataaactcagatgtgttcacagaaaaaaaaaaaaaagggggccg

SEQ ID NO: 61 - DNA, 363 bp, Homo sapiens
  SITE (335): n equals a,t,g, or c
  SITE (354): n equals a,t,g, or c
  SITE (361): n equals a,t,g, or c
gtcttggagggcacccccaccaacctcaacagaactctcccctcagggatccgtggaagtcagccactgccacagggacagccaccccttccaggcaggagctcatgggaaaccaagaccagggaacccatcccacccccagtaagacttgaggccagggaggttggaggggtctccctgtgaccaaatctgtggccatcacaaccgaccttgaaccataatactaagaatgataacaataataatcacagctaacccttcacactcactacatgccgggcaccatggcatggagcactttttctgaattatcacatgcattcatttcctggggntgccgtcgcaaactgccanaaactgnat

SEQ ID NO: 62 - DNA, 316 bp, Homo sapiens
  SITE (179): n equals a,t,g, or c
  SITE (260): n equals a,t,g, or c
  SITE (303): n equals a,t,g, or c
tttaaactccatctgtcacttctcagttacattttacgacatagcattttattttgattgtggtgaatcatataattaccattttaaccatttttaagagtacagttcagtgacattaagtatattcactgtgaagtgtaaccagcatcatgacctattttctaaactttttcttcatnccacactgaaactttgaagctgttaaatagtaactaatttttcccccttgccttcattctctggtaatctcaattctcctntctgtctttatgaatttgtttattctgggcaacaagaccgaantctgtctcaggaa

SEQ ID NO: 63 - DNA, 233 bp, Homo sapiens
tcaccacccactgctccttaccctacttcctgagcagggaactctaataactacaaaaccagcctagaaagatactactgctatggttgaagagtgacaataggaatcacactgcgattactttataaaagcagcacacacaaaatgttaggaggtaccaatgccaagttttagctgtctaaaaacttatatttctgaatccagatgatagacactggaaaaaaaaaaaaaaa

SEQ ID NO: 64 - DNA, 499 bp, Homo sapiens
gtggtttacacggtcctgcctctgtaccacgtgatgggacttgtcgttgggatcctcggctgcttagatctcggagccacctgtgttctggcccccaagttctctacttcctgcttctgggatgactgtcggcagcatggcgtgacagtgatcctgtatgtgggcgagctcctgcggtacttgtgtaacattccccagcaaccagaggaccggacacatacagtccgcctggcaatgggcaatggactacgggctgatgtgtgggagaccttccagcagcgyttcggtcctattcggatctgggaagtctacggctccacagaaggcaacatgggcttagtcaactatgtggggcgctgcggggccctgggcaagatgagctgcctcctccgaatgctgtccccctttgagctggtgcagttcgacatggaggcggcggactgttgarggacaatcagggcttctgcatccctgtagggctaggggagccggggctggt

SEQ ID NO: 65 - DNA, 356 bp, Homo sapiens
  SITE (346): n equals a,t,g, or c
  SITE (347): n equals a,t,g, or c
  SITE (350): n equals a,t,g, or c
ccacacaagcggattgtgttgcctgtgcccctgtggcctcctgcccggtgctttgctgcgttgtgcttatttgaatactttatggcatcaccacaagtgcatttaccacaattaacattcacccatatatcgccattgtccaggacttgttcttaatcgccatggtctgggtacttgcgataactacggacgttgcaaccttttgcagaacaagcgtagtggtgttttatgcactagtgttattcttggccttggttgcgtgtgcccccttagaagattatttgcatacacagttgtaaaccctgtaacggtaattgtatccacatgttgcaactacaaagttatnncanggttaa

SEQ ID NO: 66 - DNA, 500 bp, Homo sapiens
  SITE (435): n equals a,t,g, or c
  SITE (474): n equals a,t,g, or c
  SITE (500): n equals a,t,g, or c
gacacaacgctgcgcttctgctacagttgtagcaagctgagcttaaacgcggtcagcaagggaaattgtggcgccaacacttgtacaagggaagtaaataaaaggcgcactgggggcactactggccacacgataaaggttacaagctctgaggacggtcggatattaacaaacgattttaacgcgtaatgttaatgtggcgacaccgtgtaacaaattgaccaaaacgccctactaaagcggcgaaatagttgcaactaaaaacaagctttgcgctacaacatgagtgagttcgcckttgcaattacggagcgcgcggctagcacaaaatcttacgaacgcatacacgtattaaagctgctatacaagttggccgcaatacctcattagctgggtaatgttgccaagttcagcaaatagatcgtttaaacacgngaagctgcaaatagttattgtttaagctacagagagctntatggttgcacaaccacacataagtn

SEQ ID NO: 67 - DNA, 530 bp, Homo sapiens
  SITE (10): n equals a,t,g, or c
  SITE (530): n equals a,t,g, or c
tttgcaaaantcakkttaggtgacactatagaaggtacgcctgcaggtaccggttccggaattcccgggtcgacccacgcgtccggccatgcctcataatcaaatcatttgcgttcccacagcatcctgaataccgactacctcttcacttgctaaagcagctaaactgtgaagctctaagtggtttgggtttgttgtttaaccttagcgagatcctttaactgcagcaatattcaagccagatatttggaagcaaatgatatttcctcttgcagtgtccacaaatctgaatattaggggcatgaaattaggcttaccatctgatttgtaattacaattttggaattctctgttttagttgctgaggcctgagttttctggctcttaaagcatagatcatttcacctgatgtttttgaagcatcctaagtacagtagagtagaaaactgatttctttgttaattgtacactggaataatggccttttaaaaatcaaaataaaattaaccaataatggkgaaaaaaaaaan

SEQ ID NO: 68 - DNA, 481 bp, Homo sapiens
gactcaccaccatccaggacattcagaagagttcactgcagatgctgcagatcagccactcttgatctggttttcatgtgggacacaaagctgtgactgcgtgaggggttaaagtgaccaagagcagagggcacacccttacttgatcatctgaagcaaaaaccagaaccagggaaactagaggaggagtcagtgagctgctgctcctattcctggagtggttcacctctcccctgcccagtggatggtccagacccaaggaaggagtgaattgaaagctaaggaggggctcagagacwgcttcttacacctcatgagccaacctctgctagcttttgactttccttctgcrgcttcctcacttctctcaacmatcagagaattaaagagatagggcgttgttctgggtaaggctttgacttaaggtaatgtggctggtttcatctatctggaccactaaagctttctccgtatcagcaaa

SEQ ID NO: 69 - DNA, 550 bp, Homo sapiens
  SITE (1): n equals a,t,g, or c
  SITE (2): n equals a,t,g, or c
  SITE (3): n equals a,t,g, or c
nnnattattttctatttttagtgcggaccgggtttctccatgttggtcagactggtctcaaactccctacctcaagtgatctgcccacctcggcctcccaaagtgctgggattaaaggcgtgagtcaccacccctggccttatagtttatcttctagtggtcttctatcctcatttgaaaatgtgaaaagtgggtacctgagataattcaccgactcattgtttcttggaaccacaattgatctcagaagtgtaaccctgtaytactgagaagcttaatcaaggacaaatacaatcccctcactccacagatggctgacatgatggtctgtgacctgaaagttgttgaatagttggagtgttctgcattcatgtggaagrggytaaaggatgtttgatgaagcactatgggctgccctggargaggactgaagaagcagctgcaggaaagaaacgtccactctgctccagtcaaccccactgctggtgtcctatgcactgccttgcactccctgaagagagcctgggcaacagagcgagactccatctca

SEQ ID NO: 70 - DNA, 794 bp, Homo sapiens
aagcaacaacagacagctgaaaagtcctctatctcctacaagggccctaactggcaccccagatgacacagagcctgcctgcttatgctgtagtctgcctactctgctgtctcttcacatggtctcctcagaactgaactattgtatccatctcacacttkatgcctcatctttcttaggcaccccgtcgctgcatccttccagaaccatctttgaggtctcatggctaataacaacctaggctttacctttcctctgtaatccctccaagagatgagacagatctatgcttggtcatccagtaaactgaccagctgtgggcacgcaagtgtgggaggcagaggcatgctcagagctggctgcaaggacctctgacttgccttccttcaacccatcctcattgttccacccaggagtcctgcttggaactggaatgggcaaggctgctggaatgggcaaggagaagagcaggcctgataagcaaagttgaatttcactaaactggccttttagacctttccgcgtcccgatacaccctttgtgaatctgacaaagctgtatttgaccagccggttccaaacaagttcttgaacgatccggttccataaccctcttggtagccctaaagacttggaattgaagaccgggattatacttagctgacactgatcccttttgggccccaagtatagattttcccaacccaatttttagttggcggaaactcgggaagaggttacgcttttaacggttttaaaaaaattcttccccgctcctgggtaaaagtgctccga

SEQ ID NO: 71 - DNA, 296 bp, Homo sapiens
tgagtggagtaacaccctcaactcagtgtcctkggagcccccactcatgccagatcacacaagggatccaaagagagcccctcacagcacttgtcatgtggtcctggacagataacagtttccttaagagccagtggttctgagatggagaagcccggggtgctgtgggagccgagtgggcaggtggggcttcctgggggaggtaaggagagcagaggacgctgggcasagggagcagtgtgtaccaggaaatgcggtgcagtgagtgggggcacctgattaaagagcttgatctc

SEQ ID NO: 72 - DNA, 391 bp, Homo sapiens
  SITE (344): n equals a,t,g, or c
ccagtacatctgcaggttaaatcggagtgacagtgacagttcaaccctggctaaaaaatcactgtttgtgagaaactccaccgaacgccgcagtttgagggtcaaaaggacggtttgccagtcagtccttagaagaacaacacaggaatgcccagtgcggacatctctagacttagaactggaccttcaggcatctctgacccggcagagcccttcaatgatgagctgcaggcgctgagggacttgcggcagaagctggaggaactgaaagctcagggagagactgaccttccaccaaggcgtgctggaggatgagaggttccagaggcttctgaagcaagctngagaagcaggctgaacagtccaaagaagagcaagaagcaaaggtctg

SEQ ID NO: 73 - DNA, 795 bp, Homo sapiens
  SITE (370): n equals a,t,g, or c
  SITE (692): n equals a,t,g, or c
  SITE (769): n equals a,t,g, or c
  SITE (770): n equals a,t,g, or c
  SITE (789): n equals a,t,g, or c
  SITE (791): n equals a,t,g, or c
gatttctttaagcataagaccatatggaaaaaggcctaagacaaaatctgatgggaactgaattccagtttttaatagagttataatccatagttttatttacacacaaacacacacacacacactctttcctgcagagataagcaagccgttcagtgtggctgtggcttggccaggatttgtttgatctttgtttttcctgcagggccagtcttgtctttgtgtccccgaggactggtctgtttagttgtgcctgcctggaatcaaaaggcttagtcaggccccataattggtgatgactggcatactatatgcaaacttcacaatgccccttccagtggttgaaaggtcgcataccatgctgtgtaangaactttagctctctggcaatgagacttaaattcagattcactctactccttattagttatctgatttttggaaacttaatctctttaaacctcagtttcatctctaaaatgggcataatagtttacctcatagrgtttggggagaattgagtraattaatgtgtgtgaggrcactaagatccccatatagaaatagctcaatgaatagtactgtttttattctatgttaagtgagtacggagttgatggagctgttgaaacaggtaaacagatcctacatcctccgactttgtgatacaacataaacaatttagtggtgtntactattaaggatcccatccatgtttacaaaaagtagataagtgggatctgaaaaaaaaaaaaaaggggcgctaagnncccaagggccactacctgngnaacc

SEQ ID NO: 74 - DNA, 531 bp, Homo sapiens
  SITE (20): n equals a,t,g, or c
  SITE (480): n equals a,t,g, or c
ggaatatgcaggtactgggncgtttccaggtcgaccacgtgtccggaagaagaaaaagactgcaagctttcctgccaatttgggattttcaaatatttaattctaaattccagattttaaggaagatttttcaagaaactgcaagtttttgacttgaaggaaagaaagaggaaggctggtagaagcagttagagcaatgtgtttgaaattatgtccatgaaatcacagggatctctgaaatatctttaggaaacttgaaatttatgaggtctgaatggacttgtttaaaattggctctgactcctcacttctgagtttcatcctatccgagggatgagattaaggcagaggcaaaagtttcacacaaagtttctgcaacctaacgtttaatagtccgggtctacagggaagaacaatgacacagcttgagcgttacttcctccttcgtgtcattgtgatatttgacaactctaaaaaatnaaaaaaaaaaacttagagcacaataatccttgcctatgtacttcacaagga

SEQ ID NO: 75 - DNA, 506 bp, Homo sapiens
  SITE (1): n equals a,t,g, or c
  SITE (26): n equals a,t,g, or c
  SITE (56): n equals a,t,g, or c
  SITE (426): n equals a,t,g, or c
  SITE (465): n equals a,t,g, or c
nggattttggccgtacgggtcgtttnccaggtcgacccacgcgtccgcttatattntatccatataatttttatcctgttttaaaattgatgtatgactttataatatttttctactgtaacatttgtgtcagtcgcgataactgtgttttatccacaaggataataaatactctaaagaatttctttatagtatttcctacttaatagaaaataagtatcactacaagaaaaagcagtcttaatttttatttattagaaaaggttttattatattatttatgtaaataatgataaatacaacatttaaactataacatatttgatagtcttagcagcatagtctttttgtaacataagggtccccctaaagcattccaatttaaaattttcctcaaagcaaaaagctctatgacttaattctgangattgacacttcaactgggtaacatgtcaaatgaattanagaaagtgggaaaagagagaataagagtagtgatggggaat

SEQ ID NO: 76 - DNA, 456 bp, Homo sapiens
aagataccacatcctagagagcatttgtaagtagtgatttaaatttatggaaatctgcattcattttatagtgtatctggttttggtagaggccagataggttaagtggataggcatataaaaagactaccatcccctgcaactttcaagtgttttgtcatggtagtgatcaattccattccttggagaatgtgattattatttttcaatcattgttgycagtggaggagaatytcacaggcttccccttggttctgctctaataatgtccctgactctacaggtcaggaagaaagtgagagtcctgccagctgccatgtgtgtccattacacattcaagaagaggcaataacggcaaactgattagatccaccttggkatggacmtgagtcaaaactctaggtagcatctgaccttcaaaactccctctgcaggctgggtatgatggctcatgcc

SEQ ID NO: 77 - DNA, 339 bp, Homo sapiens
  SITE (311): n equals a,t,g, or c
  SITE (318): n equals a,t,g, or c
acttgggtctttccatagggatagctgagtgtcctcatgatgtggcccctggcttcccctgaagcaaatgatycaagagagcacaggtggagccatgatgtcttttattaactagtctcagaagtcacactgcatcatttggcaccatcttattgagttacacaggtcagccctgctccctatggaaagagacagagggtgttagatgcccagaggtgaacctcattgggtaccatcctgcaggtgggctgccactctgctcaatccaaatcacagctctcccgtttctcaactcccaacagttgctgttnctcaggncaaagttcacattctgcacag

SEQ ID NO: 78 - DNA, 492 bp, Homo sapiens
  SITE (416): n equals a,t,g, or c
  SITE (443): n equals a,t,g, or c
  SITE (471): n equals a,t,g, or c
  SITE (486): n equals a,t,g, or c
tgaagagactcagatgatcaagtgaagagccccagattccccctaagaagcaaaggatcgtcttttatgcctctggctaaggcaggttcttccatgactcctaagagagttgtaaaaatagaggcttggcttgaatgtacatagatggtacctggcatggactgatgtttttaggcacagaagttggagaagagatttcatgaaagacaacatcactgcattgagagaatagttgttaatttgtttagaatttaagttctactcagaatcataacatctggcagaacagcccaaacccacattccmaagtggtaggctcatttgtttctagagatttcatcatgtcgcttttccttcatcatgatctaaataaaggcagatatgtaaaatttctcacccttttggggggggtaagntaagctattatttaaggttttaatccnctataccctgttggggcattttgccccnatccagtttgctccnccaggg

SEQ ID NO: 79 - DNA, 297 bp, Homo sapiens
  SITE (31): n equals a,t,g, or c
gtccggaattcccgggtcgacccacgcgtcngctgggcccttctccagctggccctgtgggtatcaacccagctcctttcacaaggccaactgggaccctgggtctcaacccagcttcctttccaaggatgaatggccctgcakgcaagagtttcgtcccatttcctagagtggggagcctccctggsacaaacccagctgctttccccagaccagggggtccaatggctgcaatgtacccaaatggaatgttgcccccataaacaccaaaaaaaaaaaaaaaaaaaaaaaaaaaaa

SEQ ID NO: 80 - DNA, 496 bp, Homo sapiens
aacgtactggacgttaagatgagctgcttgagatgaaatctttctatataatgtgcccacagcaaattttctcttttcccctgtggcttgaggggaatgggatttaatcatttttagaatatgtaattcatataagtaaaagagrggaaaccycccgtgatccgcgcycttaagcacttaaaattakttgggrgggaaaaattattaagatttcytatcgactycttatgttaaaaaatctattctcccccaccccccccaaaaaacttttatgctagtcctgcatttcattagccctgtaagtgtgaaacgtcttaaatgccctctgcagttaaagcattttttgtctttaaattataaaattgattttgctatttggaagatgtcaatgccagtctttatccactttgtctaatatactttgtgttgattggaggaaaggcgagaggctgagacattttaaactgctttctcccctaatgaacagtaacgaccc

SEQ ID NO: 81 - DNA, 634 bp, Homo sapiens
  SITE (32): n equals a,t,g, or c
  SITE (599): n equals a,t,g, or c
  SITE (608): n equals a,t,g, or c
ataacataaaatattaaagatgagctgatggngaaatcctcaagtgtgaagaaagtttcttagctttatagctttatggaaacaagtacattgtattttttcattcagatgaatgaacttttattgaacattcattaaatgctaggcactaggcaaacaaagacttaatagaatgacaacagtaattttccatagagcttgatacagtattggtaccttcctggcagtatcccaaaggatttgttggctttcattaatcctttctagttattcgtcaatcagtgcatcagtcaacatgttgctgagcagatagaggagaatttgcttagactggtcagatttttattgctgacgttgctgtataaccctcctctgccgaagtgaaaaagtggtatcagtcattgagacataattctgctcagtgtataatagactacaaaataatccttagttatttgagtgtcctttttacgtgtatatatttataacttataccccacctattcacagaaaggattctgatgtattcagtggtacaattcacaaaaatgcacatgctgagacaataactattattaaaaatactggtcttaagattntggttttgntttttgggatacatacatcgtataca

SEQ ID NO: 82 - DNA, 453 bp, Homo sapiens
  SITE (382): n equals a,t,g, or c
  SITE (438): n equals a,t,g, or c
  SITE (448): n equals a,t,g, or c
tttaaataaaggaaaacagaactatagcaaagcctaacaatgtctgttaaatgaatagaaaatagaatgagaacaattaataagaaataaatttaaagagctatgagatttctgaggagagaatggttacttctggtgtgaagggttagaaagatttcacagaaattgcatttgtgctagattttgatggatggtaaagagcaacaggcaacagagatgaaaggagggaatgaaaccttaaattatgtccaggraactaggagtggcccagttagacatgaacacaggagatgtgttggttgggggragaagttacagrtwaagtctggraatgcagtttgagagcagacttggagaactctgaaaccctccaagtcaactngctccagggggaatcacctgaagagttatttagccataccatgacatggccaaggnggaagttttnagggc

SEQ ID NO: 83 - DNA, 163 bp, Homo sapiens
gtcctgactgacttcaggagagaggaattattgctacgtgcctctttcccagtgttgaaaatctctgttggctgcgagcagagaagcggcggaaggattcccgactccgggaagccaggtgtcggaaggaggaagtacgcttgaagggggtccggctggccga

SEQ ID NO: 84 - DNA, 592 bp, Homo sapiens
  SITE (526): n equals a,t,g, or c
  SITE (549): n equals a,t,g, or c
  SITE (557): n equals a,t,g, or c
  SITE (562): n equals a,t,g, or c
  SITE (578): n equals a,t,g, or c
aaccagttagcaggctcagagactatccccattctaaactccttatttcgggaatattttctctgtctcccagtggttcctccagggctttccagaatgtttgattttctagaacctgtttttcagccatcctggtgactcagccagtcatgaaggtgatgctctaaagaagcagcagtccatcacctgacccctagcgtctttctctgcagtgacagcctcactgatgcactggtccaaacatgggaaagactcctgaaggtccctgccaccagatgcccaaagctgaggaaccccattcagcagcctggtgagcccaaagcacaaccttagcaaaccattttccactacaaaaagtaaacaaagccgagtgcggtggctcacgcctgttaatcccagcactttggggaaggctggaggcagtgggtcgcttggggtcagagttccagaccagcctgaccaaaatggtgagaccccatctctactaaagatacagaattagccagagtggtggcgcatgctggtnaatccctgtaaatcccagctaantggggaantgaangcgggagaaattgctngaattccagggaga

SEQ ID NO: 85 - DNA, 672 bp, Homo sapiens
  SITE (7): n equals a,t,g, or c
gaaagantgagactctgtctcaaaaaaaaaaaaaaaaaaaaaaaaagccatatgtattagctggttggataccattgctgccgctactgaacagtggacaccggatgttagccctgccactaatgctgcccctagaaactggattttcttgtggctgctgctcccaccaccacaactatggtggtgaattccatcactgcatatttgaatcactcctttgaaacaaagtgttaggtctaagttgtaactgcagtgaaagggttgtactcagcaggtctgcaatgttcaaaccctatgctttccaaaaaaaggtcttttgcaaagaatgctttggctcttgaccagctcttgggagataatctgtaagcccttggaagtatcctgcctgatcagagtgtctttgtttactgtggccttggccacactggatagtttgtgctaacagtgtgatttgtggtgtgagccttggstgagagatactagtttaacctctgcatggactagagactgaataactaaggtcaaccacacaggtggctccatgcctatctgactgaaccccaaaaacaactstggggcaccaagggcttgggtgaacttccctggttgacagtatttcatacatgttttcacacatcattgttkggggggaattawgcactkggccataac

SEQ ID NO: 86 - DNA, 811 bp, Homo sapiens
  SITE (807): n equals a,t,g, or c
  SITE (811): n equals a,t,g, or c
ttttttgattttgaattttttttaattattgagaatttaggggaaagaccatcaggcttcacactttaaatctctttatgtgggcctgccacacggcgtctttgccagcttttgtatgtactgaagctaaaacatttgttcagatgctgattggcaaggcaagtgactttaaaacatggtttttttttctttcaattaaaaaaagttttattcagggctgccttctaggatgaaagattctcaaggccctatcaaagacgtaatgcaacacttatcgtggtgattcttaagactcctttgaattttatagggatatcctttttctcaaagatttttcaggattgccttctgataatctatttcgtttctggagttagcacagtaactcgtaaaccaagtgctaaaagatgaaatctgaaacacagatatagaataaacgtgttttggatctcatgtaatgttccccaacttttgcctatcattttcgaaaacaggaatgtgatctgtacttatttttagagaaaaggacacgaacatttgagaaattactgacaaaaattattctcctcctgcccctccgatccaataggtttgaagccgctggtcctcgccttttactccttagctggacagcgggttcgggatctgccccatgactaaggctgaagtggaaagttgcgaagatagaacaagagttgttccttagggtggtgtccctaaacttgaaagtggacttggtcctgctcgcagtgggcttgcacgcgccaggcttcgtgtggtggctcgcgcgcgctggcccccgagcgncacn

SEQ ID NO: 87 - DNA, 478 bp, Homo sapiens
ttccccggccctwcmagcacttatttagtgtgccrgctcctgcactgctgcyaaggyccaagaaacccagatctctcacagagccatagaagcagagggctggagtatctgtgaggacaacaaccttgtctaacttcgcgacctcattcttgagcatttctactgatgagaaactcactacccccaattgcagctcattcaactttaaaattgctgctttttgaatcactgattgtgaatattaatttaaaaaaataagtaagaaaatgttttaaatgtgctgcctctttaaaaggtctcctctttgtgcaaccaaaacccacctctctagaatacagtttgtataactgaagctataatttcataccatgagtgctgctgttagcaataataatcatgcccggattttattaacaacagaagctgttgctcgtatgaaaaaacaaacattagttctaataaacatctgcattgagtc

SEQ ID NO: 88 - DNA, 484 bp, Homo sapiens
  SITE (481): n equals a,t,g, or c
ggcacgagcagaccccaatatttggagcagaaccccaagatttgacatctaaaacctcaagcctggagctgaactctgaattctgggcctgggaccttgaaatctgggactggatttccagtactgtaccctggaacccactcttggggacctgaaccctgggattcaggcctcaaattccaagatctggactgtgggattccaaggggcctgaacccgagtttgggcctgaagtccttgctgcagacctgagtgcttaaatctggggcttgagacctcccaatcttgactcagcaccccaatatctgartgcagaaccccgggatcggatctcagactctaaaccccaccgtttggctgcttagcatcccaagactggacytgggagaccctgacctgaacaacccaaactggacccgtaaaactggacctagaggccaatattwagggtctggtaaccccgagttatttaaggttttgngag

SEQ ID NO: 89 - DNA, 832 bp, Homo sapiens
  SITE (752): n equals a,t,g, or c
  SITE (796): n equals a,t,g, or c
gaaaaattcccccatcatctttccactcacagataacaagtggttgtatgaagggaacgaggtgcttcattaatctttgaaccttgcgtatttgtcccgtatttattaacagcattgggcagtgtttttgaatgttctgtgtggttatattatttattaccgtgggggaatgagccaggtctggctctttgaacactgctaatttacatgaagaaaatgtccccaaggaggagacttaactagggaaagactcagttaccttggcctctctctgtgtgtgccagagcccccctgcaagcactaggggctgcttctagaaaggggacccagatcttaagacttcgaggaggaagataccctatttgttctccaagaccattcagtcgtgaagggttcaacttgttccgggttatttatttagcattctctattttcygctttgcttttgacactccaatgtttaattgtatatttaggaaataacaatgaagagtacgtttttaaaaagaagaatgttttctggaagggatttccccccacttttggacagtgagttagactccttctgaagcctctggatctaggttattacagggtttgtcttcttgaagctgggaactgtccaactgttgtgctatttcagacctgggcctgtctttcactttcaaggctccaggaaataatttataggctgtaggggtgtcagggagtggggtttgaactggggcctgcccaaacggtaacatgggganttgtggcacaggttgtttaaaattactatttcttgcatttcaantgactaaggtacagttaaactttttactgggcacag

SEQ ID NO: 90 - DNA, 462 bp, Homo sapiens
  SITE (459): n equals a,t,g, or c
gtgaagaacaaaattacattagtcaaaattagaaaaagatttgtttcatttttcatattcatttttgtttcacatrtaacttgcacattaagtgaaaaaaaatgattatgctttagttcttatctttgttaaaatgtagagctgtctggactctcaagatttcctcaaagggacctggaagaatagaaacagatttgacagattattgagatcctttgattacatatctagaatgcctgttacatatgtatttagttaactagttgtattaaagaaatacaataaggccgggtgcggtggcccatgcctgtaatcctagcactttgggaggccgaggtgggtggatcacttgaggtcaggagttcgaggccagcctggccgacatggtaaaaccccgactctgctagaaatacaaaaattagccaggcatggtggcacgtaatcccagctacttgggangct

SEQ ID NO: 91 - DNA, 550 bp, Homo sapiens
  SITE (460): n equals a,t,g, or c
  SITE (510): n equals a,t,g, or c
  SITE (545): n equals a,t,g, or c
gagttcctagatcgcgagcggccgcccttttttttttttttttttttttttttttttttttttttttttttaaaaaaaaaaaaaaaggaagtgaaaggacatgcatgcccggccacagtcagcaagaattctctcttttacattctgggcagaggctctcagtgttcacaactcaacgtttttgtaaaccaaaaataatgttctaaggcctctaaccatctgaatggactttctccttggccagggcgcttttaaaatttaacttgagagattgtttcaggccatgaggggaagtgggggtcagatatgcctcattatacctcaagccggcattcacatcaacgcagaccttaaggtacatttacaatctattctctctgaagcctgctacttgggaggcttcatctggcataataaaacttcagtctccacaactcttattgcaacccrgacatttccnttctattgatcccggggctttagggtaaactcaaccattgtcaaccaggnaatttaaaacggaccctaaccgggggggtccccgnctcgg

SEQ ID NO: 92 - DNA, 542 bp, Homo sapiens
  SITE (2): n equals a,t,g, or c
  SITE (25): n equals a,t,g, or c
  SITE (29): n equals a,t,g, or c
  SITE (55): n equals a,t,g, or c
anaaagctatttagtgacactgatnacangtcagcctgacaggtaccggtccggnaattcccgggcagctctgggcataactaatttgttttattggttctggaagatttccaaaaagccagaatttattattataacagtgtccactccactgccctcacagttgtgtaaaataattatagaagttttaatgatcctgattaagaagaccctagacaaaggcaattccaccttcagagtagactgcctgccctaatgaggtgtttagacattcgtgtctcctatggctgggatggaaattaaaataacactatttaaggacagagcgggccaggagcagtggctcatgcaggtaatcccagcatgggaggctgaggtgggtggattacttgaggttaggagttcaagaccagcctggccaacatggtgaaaccctgtctactcaaatacaaaaaattagccaggcatggtggctcacacctgtaatcccagcaacttgggaggttcaggcacaagaattgcttgaaccctggaggtggagg

SEQ ID NO: 93 - DNA, 538 bp, Homo sapiens
ttttttttttttttttttttttttttttttttttttttttkwktwtaagattaaggcagttactttattttgaacaaggaagtggcataagcaactcagtgtgtgccccttagggtgggagctcttccccctaccactccccaccccaaggcatcattttggagaaaaaagtgtcttctatctggctagctgtgttatctaggattgcaccttcttacatggcaggcgcggcatcacgtccagatgggcatctaaggaactgcatttcgggagatgaaactttcatttgggactcaactgaatgcatgaactaacacagggccatggacccaccagtcttgattgagttacagaaaatgaaggtgactctttacacttccaagttgctttctagatcctttcattacaaaatattctggtcaaataatcttacaaaggaaagataacctagcctcaaggctatcctctaaaagcaaagagaaagtgattgattttctgctcagtcattacattggggacctttacgaggcgcgtgtta

SEQ ID NO: 94 - DNA, 662 bp, Homo sapiens
  SITE (607): n equals a,t,g, or c
tttttttttttttttttttttttttggtgccaaaactttactggaggtcacatgggactaggggccttctgtccctgccagcgcctccattcccaggcgatgccccgctgcctgcccacctaccctccgggccccacatgaacaagctgtgtccccaccgaggtcacagctctgccctctggggatgggcgagggaggggcmacagagccggagaggctcccgcaccgtcactcctgccgggtctccaagcagtccagcaccagtgcagcctgggtcttggcttcctgcaggaggctggtccttaaatgcctcgtctgtgatgtccctcaggttgatgagcacgttgaaatatgcgccaaacacacccatctccagggctttggccgccacctggaggtctgacyggcaggccaggttcccacaccgggccagttcctgcagggccggccacagcgaggccaccgtctccgccagcgtcagcggcacagagactgcccgcctcagaccctcctgtagggccgccgtgcgcctgtccttttcctcaggtgtgttcttggggagcctcattgcttccaggtaggcggtgaaggcctcggcgtcggcatncaccagcgtggttagcttgccgaagctcgcggaagggcgggatcakgcgccgcat

SEQ ID NO: 95 - DNA, 456 bp, Homo sapiens
gatctaccaggttcctttgcccaaagactcaacaggtgcagcagatcccccccagccccacatcgtaggaatccagagtcccgatcagcaggccgccctggcccgccacaatccagcccggcctgtctttgttgagggccccttctccctgtggctccgcaacaagaagtggaagagacgccggagagtggaacctctactacccgatgcagctggacctggagtatgtgaggagtggctgggacaactacgagtttgacatcaatgaagtggaggaaggccctgtcttcgccatgtgcatggcgggtgctcatgaccagggcgacgatggctaagtggatccaggggcctgcaggagaccaacccaaccctgggcccagattccccgtggtctttccgcttcccgggtycamcgggagttccagaaattcttttgcaaggtttggaaggaagccg

SEQ ID NO: 96 - DNA, 370 bp, Homo sapiens
gctttgttgaatttattaataaaatggcagaaatgtcatycyctyccatatatgtttaataaatccctgataggtgctaagcctgccactaggtaaaaattcycttctgatgctgtctttttggccaaccatttttttatcatttattcattagctgacatttgctaagtgctttggaggggtcaaaaggggaagtaatgagaaatcaaagatggtccctacatcaaggataaactatctttttttagtcactcaaagtcataaccctttggaaacaaaacccaccagtaccccagattttgaccacagatgaatcagtactacaaggactggttagagggttgaatgaatctgtatactcagcacttaa

SEQ ID NO: 97 - DNA, 357 bp, Homo sapiens
  SITE (350): n equals a,t,g, or c
tgaggattagctatttacatgcccagtgacaagggacacccttgtttattcttcacgtgactggcctttggctaatttcatccagttacttaacttgagttcttgagtgaactctgctgagcctttccctctgttcctgctgcagtgcgcaataaacgtttggtctttgcccctccaaagctcttcgggaaggtactgtgccatccttgtgtgtatctgagtattttccaacatccaaaacagtctgtcttgcagcttgggttatataatgtatttgaaaacttacttcttgtttctgcttcccaaaaagttacccccaaataaatactgcctaacagttaaaaaaaaanaaaaaag

SEQ ID NO: 98 - DNA, 401 bp, Homo sapiens
  SITE (384): n equals a,t,g, or c
  SITE (393): n equals a,t,g, or c
  SITE (394): n equals a,t,g, or c
gggcaggcctactgactgctgcctgaaggttgctgtaaagggactaagtaaatcaattaactccacagttttcacaaaggtctcttgatatcaaaacttctttccttgcatgcttctctgatcctgtggagatgaaaattgacatccatagtcatattctaccaaaagaatggccagatctaaaaaagcagaccctgagacaaggattcagatgcaagtagtttgctttggaggtgatcccaggaaacaccagtagagtgaggagtgagacagggaaaacagggcagccatgaaagargtttggctacggaggctggggtgcactccaacaccacagcaagggagagcaagttgttgaaagatgggaaatcttcaaatggtgcnagagattgnngggatcc

SEQ ID NO: 99 - DNA, 671 bp, Homo sapiens
  SITE (655): n equals a,t,g, or c
gaggacccaaagtgtgaatctgcccaaggaactgcacagcaagcactccccggtgctgcctcgcccctgcctctgcagccaagttcccggaagctgtcctggctgctggcctggacccctgagactcccgcggagatcgtagccctggagcacaaggagacacgctgcaccctgatgcggagaggtgacaactggatgctgatgcttcgggacaccattgaggaccttagccgacagtggaggagtcatgccctcaacacctcccagtakcctggctggargtggstttctttaggcttcagatcccaggaagatgcaccttctgagctgccttgtgcaccctccccattaagcgtaggttaggaggtttccgggagctgctcagctggatctggagccagctggctttgctccgttccctggctagtctgtgcctggtcaccagggaggctgagtgaggggctgtgaacagttgccggaagcacccccctccctccccggccccgtgcaagcaagtgtcttgaagcttgtaagttgaaaagttttcaagggcctgcaaaaagaaagargctttgggcacaaggacttgaaccatgggcttccagggggttttaggaaccccaagaacttgtgaaggttgggaagcaagcttcancagccttcacgcaagg

SEQ ID NO: 100 - DNA, 696 bp, Homo sapiens
  SITE (662): n equals a,t,g, or c
  SITE (685): n equals a,t,g, or c
ctagttctagatcgcgagcggccgcccgcgatctagaacaaatatacagagaggcaaagtgttccatccatttctgttttttaacttctttatatatgcatgtttcctgttccaaaaatcacattttaatgaggttgaaatggtagctggtatgcctttctgaaaaacatgaagttatattagtaaattcattggaagctgtctatgactaatagttctacagactctgttgttcaccacaaaggtatatacggtatatatacctttataactgtaatttcagttaacttaaaatgcaatatattctgtcattgtttcccttctctttttatatgcctagtttttactgccatctcgtgacaggctagtgagtggtttaaatattgttcaaaactctgaaaagagctctgatggaagtattccaatgattttgtgatccaagggatttgtgcaaagctgtctagcggtacaaaaagaataaatatttagcagcttgtgtttgtcttgcccctgagtaaagtatacaggagcctgtctctgkttacccatttaaaaattttcctggatctgtttaaatgatggtgcccctggcagtggagtgtgtccaagctcacttaggaccagagtgggaagagcatgggaacccatcaggtgggccacanaaaagcctgcagttgggcttttnggcttcggtca

SEQ ID NO: 101 - DNA, 555 bp, Homo sapiens
ggtaagtgaggggggcgggacggtgtaccggttgtggcggcgatggctgtcggattgggccgcttgggggtagtttggggtgcgagtccaggggcgagggaagtctcgagatgaggagaaatgtaggaggcagccgaaggccggcaaacgcggacagagatggcacctgagcgtccctgggagaacctgggcgacaggccagagaccgaaagaaatggaggcacgaaaagaagcttcgagaaactgagggactgaaagacgaggtgttgggagaggagggaagctgaaaactagagagcgtgggcagatgccgatgggttccagcgagagtcttagagcccacgaggccgagaggcgtggtcgcccatgaacttggggagtggagggaaaagtcggaamctgatcgtggcacactagaaacagaaaaaatggatttagatggagaaacgagacactgaatcacgggggagaccgagagatacggaaggatggagacagttgaaataggaagaaccccacaaaagctggagataatggagaacgatgctgagaaat

SEQ ID NO: 102 - DNA, 591 bp, Homo sapiens
  SITE (410): n equals a,t,g, or c
  SITE (507): n equals a,t,g, or c
  SITE (581): n equals a,t,g, or c
  SITE (584): n equals a,t,g, or c
gaaggttaaataaggaaggatatttgtaaagagcattggacagttagaacttaacatagttcttggaacatagaaggtactccatcaatgttaaatttcattattaacatagtgctttcttcaccacttgagagctatttccctctgcattgattgtcaaccatttcagagcttttttccctctatatagcattctttagctagattttacttactcttgattttatttaatgataggagtttgtggctttattgtattcagtagtttcattgtaagctatctctgtcttcttggagccaggggactaaataaacatgtgtatatatgtgtttgtacatacacatacacacacacagaggcttcccmagaagactcattaaaactccattccccccgcctcagccctggntgttgaagaccctgctctagggagtgtccgtgttcctaaaaaagaagtaaaatgccactgagaactctcttaagactacctttctccaaatgggggnccttcactcaagcctgtggttttggtcttaaggactttgctggcacaatagctcgggccttctcagttcggtanganccataca

SEQ ID NO: 103 - DNA, 241 bp, Homo sapiens
cgctgatgaaaggccgctccgttagggatggcacctttcgccgggcacagcgtcgaagcttcactccagctagctttctggaggaggacacaactgatttccccgatgagctggacacatccttctttgcccgggaaggtatcctccatgaagagctgtccacatacccggatgaagttttcgagtccccatcggaggcagcgctaaaggactgggagaaggcaccggagcaggcggacct

SEQ ID NO: 104 - DNA, 309 bp, Homo sapiens
aaaaaaaggaaagtcaacaaaatttatgtaaggccagtacaccaaaaactayaaaaaattgctttragaaattatgaaagaactaaattagtggggagataaaccttgtcatggatcagaagagttgttatgtttaaaaagtcagttcttcgtaaattkwtctccagatccaatgcaattctwwtaawaattccaascggcattttggtagaaatttacaagmtgattctaccatttatatggtaatgtcaatgatcaagaataataaaatagcaatattattcttttataatattgctattttattat

SEQ ID NO: 105 - DNA, 509 bp, Homo sapiens
  SITE (465): n equals a,t,g, or c
gattagctataaaggttgtcctgattttttttcctcaacttccaccttgatttctctcaccagtgccacagccaggaataaagaacaagagcgttttaattagatcagatttacattctsactggctcttaaactagcaaggtgacctagggaaaggggccagggtttccctctatcattcataaatgtaattcagggcccctttttatccccaataccagcatacagaaactgctgtaaaagaagaagttgtgggtattttttttttttttttgtctggaggaatggggacaccaaaactcatttgggcagcagaggtgaggtaaggccatttgtattgtctgttctgttagtagtcatacatgccacttatccctgccccagtccctgttaggagtgttatgtgggtatactgaacgtggaccttccccgaatccaaagaatccagatgctttgaataagatncatgggaccttccgggtttctaacatcgccagatgtttgtttca

SEQ ID NO: 106 - DNA, 462 bp, Homo sapiens
  SITE (206): n equals a,t,g, or c
  SITE (423): n equals a,t,g, or c
gacctcggctctacctccttcagtggctaaaatctgataaggccctaatgatgctctttaatgatggcacctttcaggtaaatgaactcttcaggaaagtgcacgtttaggtcctaaacagaaagatttgtacctagacagtttagtgattgactgaacttttctaattctcgaatattttgagagatctaatgtctatgtttatnttttaaggtgaatttctaccatgatcatacaaaaatcatcatctgtagccaaaatgaagaataccttctcacctacatcaatgaggataggatatctacaactttcaggctgacaactctgctgatgtctggctgttcatcagaattaaaaaatcgaatggaatatgccctgaacatgctcttacaaagatgtaactgaaagacttttcgaatggancctatgggactctcttttccactgtgagattacagggaa

SEQ ID NO: 107 - DNA, 698 bp, Homo sapiens
ggaaagcagaactctattttttccctttggtttagcttgtgagttctctgtgggaggaagatctgatatggccggctctctttcaaccctagttccagcagagagagagagagaatgttctgggtgacggaccctcccagcaaaggggcttgcttwattkgcttctctccccaaccctccactcttagcctttgtcttttgaataatccttcctcattccacttttgtggtgggggataattagtcacaactcagtagtaagccgtgcctgctgtagagaggaagcattcagggggttggaagtgtggagaccccagtctgattgctggaatcagtgctcctcggttcagtgttttgagaccaggtctttagcttctagctgggcatatttttctgctttgtaatttaacctgtatcttttttttcccatgttcctgcctcatcagggaattgtaagatttagggggaggtgtgggaaatcttactctttgccctaaagtattcagcgatcagaattctggataccctgcaaaacacctccaacctccctgcctttgaaccctgtgttaacaatgagaagcttgtttatttgaaggctgggttctcattggccacaggggtaggttgtaattgtgtgtctaaaaaattgccttttgcattccccaatagcatgacaactggaatagtaatttgactta

SEQ ID NO: 108 - DNA, 599 bp, Homo sapiens
gggagcagcagcaccaccacagccaccaccaccaccagccccacaaaatggacctcaaggcctacgaacaggtgatgcactaccccggctacggttcccccatgcctggcagcttggccatgggcccggtcacgaacaaaacgggcctggacgcctcgcccctggccgcagatacctcctactaccagggggtgtactcccggcccattatgaactcctcttaagaagacgacggcttcaggcccggctaactctggcaccccggatcgaggataagtgagagagcaagtgggggtcgagactttggggagacggtgttgcagagacgcaagggagaagaaatccataacacccccaccccaacacccccaagacagcagtcttccttcacccgctgcagcygttccgtcccaaacagagggccacacagataccccacgttctatataaggaggaaaacgggaaagaatataaagttaaaaaaaagctccggtttccactactgtgtagactcctgcttcttcaagcacctgcagattctgatttttttgttgttgttgttctcctccattgctgttgttgcagggaagtcttactta

SEQ ID NO: 109 - DNA, 786 bp, Homo sapiens
  SITE (487): n equals a,t,g, or c
gtggccctttctttttcctttgtcctcaatcgtaagtggatgtggtgggcttagggataacatagcctgaagtgtggcgtatggatcagatggcaggagacctgttcatctgtggcctgcatcagatggcaggagacccagttctaaatatagaagctggtgtgagtcacagggaatgactgatatttctcagaaggtaagagattgtctctttatgacaattttgggcacctagagacagaaaagacactggatctgatttgaactctatctctttgagctcagattccccccaaaaaatatcatttaaatttacctagagaacacacatgygtgtgcagtgtagtaaacctcatgtgcagtggctgattacctttggagacagagcagatgaccataagcctcatctgggtaagaacagctcaatttagccatcataccccaggctttaccagccccaggaccccaaagcctacattattctgantggtagcatagcagcatttcttcatatctgccttcctagtatggatacaactttaggaaatggtcctactagactagacagaaatttgactcaaaatggttgagccatgccaacctgaatagaagtgccagcacatggcttctgtgttatctgttatctcactgctttgagaagcataaagcctcatccaaaacaatgatgtgagggaaagcttacaaagaacactgtggaatggcccttttcatatatgagaaaatatttgaaaacacgtacaatacattaatactatgaaaaaaaaa

SEQ ID NO: 110 - DNA, 857 bp, Homo sapiens
  SITE (729): n equals a,t,g, or c
  SITE (805): n equals a,t,g, or c
  SITE (840): n equals a,t,g, or c
  SITE (848): n equals a,t,g, or c
aaataatggaaaaacgtcctgaagaagagagtgaagattcaaaaatggattcatttttggacatgcagctaactgaagacctggattccttaatacagaatgcttttgagaaattgaactcttctcctgatgaccaagtatactcatttttgccttcacaagatgttaatagttttaatgactcaagtgagtttataaatcctgattcaagtaatatgactcccattttttctacacaaaatatgaatttgaacggtgaaaatttagagaattctggttctactttaagtttaaacccattaccttcacattcagttttgaacgagtccaagtgttttataaaggataacacattggctttgggaaagtaactacccggaagattctcttctcagtagttctttaaatgtaggcaagtgactccatcgcaggttgtagcagtctcaatcaaaaacagaaagaacttttagratstgagtgcgttgaggctcaattctctgaagctcctgtagatttggatgccagtgaacctcaggcttgtttaaaccttccagggcttgatttaccaggtacaggtggggatcagaaatctactcgggtctctgatgtgtttctaccttccgaaggtttcaacttcaagccacacaaacatcctgaactgccaactaaggggaaggatgtgagttacttgcccggtacttgcttcctctcccatttgctgtttgcctnctccgccaccttcaccgatgtggggattccaatggattcctgcttttggacctttttcccaggggaaaccaggggnttttgttagggttcccgttttgttaaaccacaggntggcacantggggggat

SEQ ID NO: 111 - DNA, 477 bp, Homo sapiens
  SITE (444): n equals a,t,g, or c
  SITE (462): n equals a,t,g, or c
tacctttgatctctaaggtcaagaagaaagggttgatgtcaaacacagagaacagcatagaagcaattttttttctccctaatccagagcttactctgttagtatgtggtatccatactattttaaattcaatccctgagagaggaaattagtgttgaaaatgttgagaagagataagacttgactgaatggatatatgacaaaaaactatttcatactcgaaaaggagcttacaaaagaggcaaatctggggccagttcctcaagattcagccactgagcccagggctgggccagatgctaaagacattctctctttttgtaagtatttgatattctttgtggtatcaagcacaactgaatgtggaaataattttcagctgtcatttcttcttgggtgccttgctgtcaaaatcctgaaagacagctatgtctttactttaanaaaataatatgttaatangacatgattttgccc

SEQ ID NO: 112 - DNA, 463 bp, Homo sapiens
ggagggtttaccactatccccaaccacacacaagcacacattttaaccctgcccagtactcccaatattgtcatactgcaagtcgtttggatacatccgcatttcatagagatggagtttcactattattgcacaagctggtcttgaactcctgggcttaagcaatcctcctgcctcacgcctgtaatcccagcactttgggaggctgaagcaggcggatcacgaggtcaggagatcgagaccatcctggctaacacggtgaaaccccgtctctaccaaaaatacaaaaaaaattagccgggtgcagtggcgggcgcctgtagtcccagctactcgggaggctgaggcaggagaatggtgtgaacccgggaggcggagtttgcagtgagtggagattgcatcactgcactccagcctgggcgacagagcgagactccgtctcaggaaaaaaaaaaaaaaaaaa

SEQ ID NO: 113 - DNA, 468 bp, Homo sapiens
ggtctggtgagggaggcatggctgggagccaggcctggcaagtcccttccccaatccgggcctgtccaggagagaagcttctagactttgggagcagacgttggacatgtctctgggactgagcgccttccggtgagggcccatgccagcctccgcacgctcccggcacagtggtgggctcacacccataggccgctctcccgggccctcaggaaggggcaacccgggcagcagaactcacgggcttgggggcccaggcaggaagcatcagggcaccccgcagccacggtgggtggctcacggtgggcggctcaggaagcatcagggcaccccgcagccatggtgggcggctcaggcttggtccctctggcacaagggcccagcagagcatttcacccagcccggggcccgtkccctcccagctagctcccaggtctcagcagggcgtgaggaaagaagccagggcct

SEQ ID NO: 114 - DNA, 443 bp, Homo sapiens
gcgcctgtggtcctagcactttgggaggccgaggcgggtggatcacgaggtgggagttggagaccagcctggccaacgtggcgaaaccctactaaagatacaaaaaaaaaaaaaaattggccgggcgtggtggtgggtgcctgtgatcccgggtacttggaaggctgaggcaggagagtctcttgagcccggaggcgaaggttgcggtgagccgagatcatgccattgtactctagcctgggtgacgagagcaagactccgtctcaaaaaaaaaaaaaaaaaaaaaaaaagaagtagagacagggagacggggtctcactgtgttgcctaggccggtcttgaactcctgggctcaagtgattctcccaccttgacctcctaaattgttgggattacaggtgtgagacagtgcacctggccgaaatagctcaagtttctgaaaa

SEQ ID NO: 115 - DNA, 467 bp, Homo sapiens
gcataactcagatttcaaaccatttcagtgacctatccaagaagaaatattttagaattgctgtcattagatttttagttagtactccattttaatgtgtcattaaacaaattttaataaagttgattgaaattagagaatagacttttgtttccgaaaggctataaatcacatagtaatttagcttcaagctcaaatatgatagacatataattaaaatgatttaaaataaactcatcccttcaattatttctttccaagtaccattgcaccctcattcttctaggcaaagagaggaagttatctacctcagttacattctgatatttctcctccttctagaacacttctccaagagaggagagtatggcctagcagttggtggtgtatcttaagcaaaaaggaaaaaaacmaactatatattgtycaatctgttagcactgtgttgctcagaaaaatgraagtta

SEQ ID NO: 116 - DNA, 465 bp, Homo sapiens
gattgagatgttccacaagagcctggagagggccgaggccggagataacctcggggccctggtccgaggcttgaagcgggaggacttgcggcggggcctggtcatggtcaagccaggttccatcaagccccaccagaaggtggaggcccaggtttacatcctgacttgggacatggcctgtcggattatcctgcccccagagaaggagcttgccatgcccggggaggacctgaagttcaacctaatcttgcggcagccaatgatcttagagaaaggccagcgtttcaccctgcgagatggcaaccggactattggcaccggtctagtcaccaacacgctggccatgactgaggaggagaagaatatcaaatggggttgagtgtgcagatctctgctcagcttcccttgcgtttaaagcctgccctagccagggctccctcctgcttccagtaccctctcatggca

SEQ ID NO: 117 - DNA, 202 bp, Homo sapiens
  SITE (146): n equals a,t,g, or c
gctaattcagaagagagaacctgcccgaaagtgtgcatcatctcagatttgcttgagcttcttgtgttcttagagacagtgagcctcctcaggacatcattgttaattaactgctggtgattaaaaccacaggattctagtaattnacagagccaacaacaaacaaacagcagttttttttcagttacagcattttgatatt

SEQ ID NO: 118 - DNA, 482 bp, Homo sapiens
gagagtgtctgcttgtgttacaaacctgatggagcagaggtggggcaggggggaaatgaaagcaaaagggacagacttgaagctgcacttttgcaatcaactaacagttaggaaggacttgacttgctggggctaaggaaaacaaatctggaggttcattttgcctgtgaaattaaaattatactttagtaaataaagctgacgccatttaaccatgaacccggtgacatttcctggcttgctgcagcgtttctgcttgtctccttgttacatttgtttaaaatacaaacacagcatttccatgttgccagagaagcaaatgtgggctgactggctgwttttagctgctatggtttttctgtaacctttaacaattgttgtgacaaataagattccatgtaaggtgcaatttctaactgtgcagtgtttgtgaaccacatccaccttctccaggtttggtatttggtcgactaagttgacga

SEQ ID NO: 119 - DNA, 467 bp, Homo sapiens
gtgcccggctaatttttgtatttttagtagagacagggtttcaccatgttggccaggctggtgtcaaactcctgacctcaagtgatctgcccacctcagcctgccaaataaggtactcagtcttcagattgaaagtaagaagatgagttgataataggctctattctctgtattggcacgtcctacagatttgggtccctttgttgaaaatcatcatatcagatcttcatggggttttcccctcccccacttccccagttatctgctttgcaagtattccattgactgttgaaaaatataagcgagcttttcttactacttttcttcctacttttcttcctctgtaatacctgaggttcatttagatggtagctgtttacagagtcttacaacctcaaagttgatagagcatttagagaatctaaaccctcgttgggtctcagcacatcccccttagcccctgactg

SEQ ID NO: 120 - DNA, 472 bp, Homo sapiens
gcccatgctaggggggcctgagactccctgtgaaatgcagctagctgaggaggccatgttgatccgcccccacggaaaaccgggagcctgggtgctgcacttgcctctctgaactagaactaattgttcttaaagatctttccaaataccaatgatgcaaaatatttggatggttcaccatattgttcaccatatttaaactgtcagaaccttaaatatctgagcaaaacctcagcaaacaaaggatattttggggacttgttatgtgtgttgcacagcagagagatttgtagtctatacgacttccaaatcctgtaaacgaagtatttcagtgttgtcattttcagctatagaccgtcctacgatcattgccttttcttttgctattaagagatggctcattcataaacattcctacagttgtgtggcaaacgcaaaataggccctgcgtgattccactggctctgattga

SEQ ID NO: 121 - DNA, 480 bp, Homo sapiens
gcttaaggctgttaaaatgcttggagggtgaaaaggttgaaactattgattcattagatgctttatctccaatttgcatctcggctttttccatcttcacgggcatgggtggcgatagctggcaagattccttctgtagtgagaccatttatgttcgaattgggtatggacaaatgaggtcactttgagttccccattacttctcggaactgccttcaggacacttaccccaaaaacccacacctctgcaaaaacaaagaaatacctcactccagaccaaacaaaagccagaggacagatttagctgcctaggatgtcagacaagaaatttgggggccatttaaagggaactaactgatgctgtgagccgtttaactcagatttggagatagcactgctgatatggccttattaagtagcaaaccaggagaggaaaatgaaattgaggagtaaattaattgggctgagcattaaggaagc

SEQ ID NO: 122 - DNA, 464 bp, Homo sapiens
  SITE (381): n equals a,t,g, or c
  SITE (424): n equals a,t,g, or c
tctcttactgttgtttatttataagacatttcctcccagttagtggaagttagatccgtaagaggctccagtgattttccttccacctcccctccctaatttctgtgcttcagcctctggaacactgtgaactcgacaaactaatcagagcagggagcttaacagccaggcctggacaccctcaagagactgtgtgctgattctcagtcgtcactccttggatcaggaaccatagtcctggtgagtggtgaggttccagaatttgatgtgtcaaggattttattcttggtgtctctaaggcaagcaggaaataaagggtgtttttaaaacaaacaaacaaaaaatacaattaaagaaatactaccaaacagtcaaatggantgatgaagatttttagcgggcacaacttagagcactctacggncaatggcagagcttgaggctatgctcaggagcagctgtag

SEQ ID NO: 123 - DNA, 455 bp, Homo sapiens
gagcagacacggtgctggtcttatagctgtcaaattcaggaagggtcttgggcttaaaatactcaaacatgaacagtgcatcctcccatataagatccacctgctgggccgagtgttcctccaggtacctggccttactcttcttgctggggaagctgtacaggcagtagaagcactgctccaaggctgtctccagctcctccttgtaagggtgcgtgtcttcagaggtggatgcagccagttccttctggagtactcgcacatagaatcgcagcagagccccatctgaattgcagcaccaggaccttctgcccaaatactcgtgggctgtgttcagcagcatgagggaggatgggagcatgggcgtctctgacatcccttcctccgctgggttttggagctgctgctggtggcacagagaatggaaagtgtcttctcctggccagaagaatccg

SEQ ID NO: 124 - DNA, 478 bp, Homo sapiens
  SITE (393): n equals a,t,g, or c
  SITE (422): n equals a,t,g, or c
  SITE (441): n equals a,t,g, or c
  SITE (471): n equals a,t,g, or c
ggttttatttaatccttccatcacacctgagttaggtggtatcattcccattttaaagatgaaagaggccatataatagagtgcttaggagccaggatgggagcactggaggcagaatgctaggttcaaatcctcgttctgccatttactaattgttttgtgagttttgttgagttattgaacttctgtaggtcgtatgttttctcttgtccaaagtggtgattataataatattatagaattgttttaaataaattgactaaaagtaaaattcttaggaaacatgcttgcacataataagtcctcagtaagtgttaaactgctactgttgggttataggtcatgaggaactgagttaagttttaggaagtcccggggacttcttaccctggntaggtgggttggagcccagtggatttaantatagggtggtcctggatnctaggtccctactttgcctattttatcctngttggcc

SEQ ID NO: 125 - DNA, 303 bp, Homo sapiens
  SITE (276): n equals a,t,g, or c
tcgacccacgcgtccggtgtccggccaaatcctactttctttagctctcaggaagcctacggtgggtcaccttctaccttctacactagatcagtttcctttgttagatgctttcatattaccaagttcctatagtcaacttcttatcttacttagtaattatgcattatcttatctgatattagtatctggacttcccaccagaattacaaccctctgggaaagctgggttatctgagatttttttgtgtggtttttgtgagacatactcgctcnggttgccctgggctgaaggtgggagtg

SEQ ID NO: 126 - DNA, 724 bp, Homo sapiens
  SITE (556): n equals a,t,g, or c
  SITE (559): n equals a,t,g, or c
  SITE (565): n equals a,t,g, or c
  SITE (720): n equals a,t,g, or c
ttcaggattcctgctgacctgtgtctctggatgagggagtcccatgccatcttcattccagaatcttattttcttaataagggtgattcagagcttaaggacaatgacacctagcaatatgtagcatggcatggcttagaaaatattctcatatccattttcacacactttgagaagtaggcagagaagatatgactgtcaatgaaaagggacttacctaaaaccacgtagcaagtttgcagcagagccaagactaaaaccagcccctatctttaggttaggtctcttgcacccaagcatacccccttcctctttcatccacctgcacctcctgtgcatgacagccccagacaatgaaggcctaggcaccataagttggcacgtgccctctgtaatagcaagctaaggtcatcctggggcaggggcagaggcaagagaggatggcagggagaattatgcacagcattgtcattttctgagtccccagtgtagctaaagaggcagcctaatgaagcagcttcttctggaaactccaaggactatgtcctgggagggnaanccaagncctcaggcagcactcaggggaagaacagatccacatatgcatagtgctccagctaggatctggccactcaggggttgtcacagaagatatgacagtcatatcttctctgcctatttctgagacacccccatggtcacccttatgggatactgcangccc

SEQ ID NO: 127 - DNA, 155 bp, Homo sapiens
agaaaccgcgggtctccagccccggggcagcgcgccaagagcgcagagtgggaaagtgaactgatcgcctaagcagcgggtggtcaacccgcgtgtcatgtccgggctctcggggatcccactctatccacctacggtttccctcccgacaccct

SEQ ID NO: 128 - DNA, 495 bp, Homo sapiens
tgatgggttcttggggctcctggagtttgatttaatwacmaatatttattgaccacatattgtcttgtactgtgagaggccttatgggaggtcaaaaggaattttgccctaatgatcttaataatctccataggacaaaaagtgcacatgtataaagtgaaaacaaggaaagyctggcagatgatggttaaatttatttgctgatcaatgtgaatgaggcagactaagaggtttctaccagaaggaacttgagcttcttgattcgagttagccatcaagtaacttgaggtgaccttgggcaaggctttcttactggtctcctatattggacgagggcccctcaagcccaagtgagaaggctgtttctattatctccttttcctcctatctccagtgggacacccagtcctgcgaattctattttgggaatgtttctagagtctgcccagtctcttcccagtccagtgctttctccatcccgtggccagggtagtt

SEQ ID NO: 129 - DNA, 771 bp, Homo sapiens
  SITE (558): n equals a,t,g, or c
  SITE (607): n equals a,t,g, or c
  SITE (722): n equals a,t,g, or c
  SITE (758): n equals a,t,g, or c
actaaagggaacaaaagctggagctccaccgcggtggcggccgctctagaactagtggatcccccgggctgcaggaattcggcacgagggactgaggacaggaggcatgggtgtgtcctgcggccttggtggagcctgtcctgtggaaggtttattttctgtaaagaagcagtctggctcgtgcctgtactcagcctctctgtccccacacgtgactgtccttagaatagcaactgggtcctcggattccagtaccccaccatgactgccgccagccactcctatgtcagtcttggctgtctgccaggcactgctgatgattgcccccagaaccgtactattaatcccattacacagatgagcaaactgagacccacagaggctgagtaacctgctatagtartaagggtcagagcaaggctttcaacctgggcaacttgcattccaggccttcctcatagacagagtctgtgtctattaggaaaggctacaaggagcaggtggcatgtgagccgccacggagcttggcttggggctttctaagtggctagggcagangggtgcagtccaggcagatggagggttggggcagaagggacctgtgaanaagtcctcctgtactatgggatccttcccttcttatcaaggctctggcctggactcaattcaaaggcttatctatgcaggaatgaaggcaacattcttgatgtagagtctaagantctgaaggtcaaggaacctttcttggatacccttcnttctggctaccag

SEQ ID NO: 130 - DNA, 518 bp, Homo sapiens
ggtggatcctcctttttgtaatattttattctagtctggcctttttccctgtataggttttatactcaggcttgatcccatcatggctgcgagatggcagtaacaatgctaggcataatatccaaaattaatttacaggtacaggaaagggggcatctctttcgtgtgtctcttttaagagtaagaaaattcttgtagaagtttctctgcattccttcatatactgttggccagaattacatcacatgctgagttgtgaagcagtcattaatgagggtgagagcacatgattgattcagacttatcaagatctgccggggctggctgcataattcccagggcccagtgcaaaatgaaaactcagggcccaaggtaggggtggggaagttaatcttcctttgtcatgggcccaccatctcaacccacagtggaggacaacccaagggattgctgcctgtgtgccaggatgcacagaggcacctagatgatggatgggcaagaggctaccactggtttgc

SEQ ID NO: 131 - DNA, 366 bp, Homo sapiens
  SITE (3): n equals a,t,g, or c
tanttaagggaggagaggttctggacaatatcccaaagcttctgaactgcctgagagactgcaatgttgccatccgaggctgatgcttcatacagcagactcagcctgtgacccaaacaacaaacgccttcgtcaaatcaaggaccagattctaacagactctcggtacaatcccaggatcctcttccagctgctgttagatactgcacaatttgagtttatactcaaagyagatgttcaagcaaatgctttcagawaagcaaaccaaatgggagcattacaagaaagagggttcggagcggatgactgagcttgctgatgtcttttcaggagtgtaacccctaaccagagtggagacaaatggta

SEQ ID NO: 132 - DNA, 496 bp, Homo sapiens
  SITE (462): n equals a,t,g, or c
aggagagcagcaaggagcaaaacccacaccccgctgctggattttagcttttactcaaggacagagacctttgaagatgagggagcagaaaacagtttttccagaaccccagacacagattttactggacactcactctttgattcggatgtggacatggatgactatacagaccacgaacagtgcaagtgacgtccagcctcactgaccctcttccttgggacctgccactccctgggtcggtccattttcccaggtagcaatccatccgagctgggaggagatcttcgtgcttggcagagttttcacatgctaactgggactataggcagccttatttcttttttgtacaaacaaaacacagaaccatttcagatggactccattggaaaacaaacagggcaaaaaataatgttcaggcatgggtttcctgaaatcctttttgtttttcattaggaaaanttttattattattgtgttggtaggagcggttttt

SEQ ID NO: 133 - DNA, 518 bp, Homo sapiens
ggcgccggccaatckaatggaagggggtggagccatgaagccacaccattggctctccccgacgcctgttagaccatccgaggcaaacgtgcccgcccacccccgggggccggatcagtggagcgccgagcacctagatgacattgccccggcgaggctccgggctccccgcccacgcgcagagctttccgctcgtcccagctgcacctcggtcctgcaggccgtccgcctggcgcagctgtagccatagcaactcacgcaggaccgcgctttacagtttaccaggcactcggacgcctttggcgcgagcgcccgtcgctccttcctcaggtcactgcggtgcaccgtgcgggtccgcgtcgtgtcctccgctccggagcagggaccgggcgtgctcgttcagtcctgtgcgcactcggaatggggccggggaaggctgagcctcagggcgaccctgatgtggagccgtgcgaccgctcactgcggttgaagagacccaggcgcagacagcgcaggcg

SEQ ID NO: 134 - DNA, 519 bp, Homo sapiens
  SITE (506): n equals a,t,g, or c
ggcacgaggagaactagtctcgagtttttttttttttttttttaatgtaaaaatcaatttattatacaacaatcatagataatgctttttatctacaaagaraaatggcttctgcagcctccctgtctactccattcatgatactatgttcttaagatataattactttcaaaggaaaacaaagcgatatccatattttccaaacaaggaagcccccagacacatttatgaacgatatggaaatattggaaagaactcaaatggactcctagatacaaaaggctgttctgcccatcacagtaaacactgttttgccttaaaataaaaataataaaatatttctcaaatgcaggggtgaggactttaccccgtaacatgcctaagtggttcgatatataattttgatggcttggacaattgctatgtttaattccattcagttaacattccattttgttagtttwaaaaattgggggggaatattaatagatatgsctttacmgganttaagtattttcc

SEQ ID NO: 135 - DNA, 478 bp, Homo sapiens
  SITE (353): n equals a,t,g, or c
  SITE (471): n equals a,t,g, or c
ggcacgagctgccctccaagctgctggtctacttgtcggtgcgctacgcaggacgccgcctcacgcaagccgggacactgctgggcacggccctggcgttcggcactagactgctagtgtcctccgatatgaagtcctggagcactgtcctggcagtgatggggaaagctttttctgaagctgccttcaccactgcctacctgttcacttcagagttgtaccctacggtgctcagacagacagggatggggctgactgcactggtgggccggctggggggctctttggcccactggcggcttgctggatggagtgtggctgtcamtgcccaagcttacttatggggggatcgncctactggcttgccggcaccgccctcctgctgccagagacgaggcaggcacagctgccagagaccatccagggacgtgggagagaaagagagatggtgctaaagaaaggattagcatntgagatt

SEQ ID NO: 136 - DNA, 411 bp, Homo sapiens
  SITE (95): n equals a,t,g, or c
agagcatggcttccttggccatgtgtcctggagtggttttggtgggtggggttttgttcccacttgtaaacactggatcactctgtcggcagagnaaatcttggcagttcttcagctgcagaggtttagctgcaaccatctgcaaaaaggccggtattttcgattccattgaccttgtgatcagggtgttaacagtgcatggagcaggctttggagggccgtagtcaaaagtctgaggcccccgatatcccagtatgactttgggaactgccckgaggtctgggctgtgtctgagggactsctggccaaggagcgttctctccttcagaagcagcatccgtgctgtgtgctgggtcagggcgacccctggctccagggtcttctacacacagctcttcctttggcaggaag

SEQ ID NO: 137 - DNA, 697 bp, Homo sapiens
agcacccttccatggtcatgaggtttctggttgcctctgtgtgttagaagcttggagaccaatgccttctgctgygatcrcgttcwccacagttgcctctgggtaggagcctggacactaatagaaaatggatgcacttgagccgacctaagcattcatggtcatgagatttgtggttgccactgttggttaggagcatagagatcagtaatggacacacctgggctggcagaacatcttgccttgatctggagccccatgtctgcccctctgtagaggtgcacatgggccaatgatggatgcaatgagctgatcattttgctgtgatcaaggctatgttgcctctgtgttaggccaataatggacgcacctgaactgacctatgcatttgcaagctccacggctgtcccagtgtttggagcatggagaccgatttgagttatagtcagtgttcttgccttggttttggtggcttatttaggatacttactgaatacttttttaaaaagtattaaatataaccaaagaaggccaactgtggcccaatgataagtatggatttgacatgaaatattatgttgattgatcaatttttgtaacaatgggaatgattaatgaaagaggtatattcagtgatatcacatatgtcactaaatgaatgatgtgatcccatagatagatattaggggatataaga

SEQ ID NO: 138 - DNA, 549 bp, Homo sapiens
  SITE (486): n equals a,t,g, or c
  SITE (540): n equals a,t,g, or c
gactcagcagtttactctttcatcaataatgcactcactctgaagtggcaggctggacactgtggcccagctctgcatgggtgtttatagtttatgccagtaaatgtttctgttgaatctgtcaggagctgcaggcctgatcccttttcaagttggtggtgagagcagtgagtcagcatatttgtaaacttcagaagagtacagaacactgataatttactgtggcactggtaatttcatgaatatggagtgggcccatatgttcatttttagctctgtaaatctcaagaactgttactgccttggtaagctgtatcagtgcattggcacccagataaagagaactttctgcctgtcttgaagtaaatgaggcatcaacccagacttgtgttaggctggcctttgctgtggttttacagtagatgctccagaactgcttagaaagctcttttcagatgggratgtgggttgccttctggtagcatngcctgtcatcagaggtgtggttcccccagtagccggcctatgacacggcggctncagtttctt

SEQ ID NO: 139 - DNA, 512 bp, Homo sapiens
  SITE (4): n equals a,t,g, or c
  SITE (62): n equals a,t,g, or c
  SITE (63): n equals a,t,g, or c
cccntgaagaacctgggaaatgtaaaatccatgggttccaagttttaatacccttaagtgannccctcagtaggtgttactaggagttcactgaatgaacttagggagtgaaccttcgatgtgcttgattttcttttgtgccttagtttctctgaatagcagaggcatcaaattttggtggggaatgagaggagtattaggggaaagtttgaaaatagctctcctggagatggagggcacacagagtgktcctcaggctcaccttgactgagttgattcacagttatcctgcatcagaccattagatttctttagtgctatgattataatagggatttttgaatcaccaaaaacagtttttagatgtttatgttctttgttttactatcaatgttgtgctggttaagggagagaaaagttcaagaagatcttacatatttgaaaggaaattggtactcttgaaggctatgcaacatgagtctttgaacaagaattccttgctactttgattc

SEQ ID NO: 140 - DNA, 315 bp, Homo sapiens
  SITE (30): n equals a,t,g, or c
  SITE (314): n equals a,t,g, or c
aaatacctatataagacagcatacttaatnaaattaaacctttgatgaggcggaccatgaagaaagagaagacctcattaaccaatgttgaggtgaagaggatatcacaaaagcttatgagaagatattataaaaacttgatgtcagtccatttgaaatttagatgaagttatactattagaaaactacaacttaacagacacagcagaaaatagaaaatctgaatagtcctattaaacatgatccttagtggaaagagytacccactagttttgaagtctttgggatttacaaaagaaaaaaaaaaaaaaaana

SEQ ID NO: 141 - DNA, 330 bp, Homo sapiens
  SITE (312): n equals a,t,g, or c
ctctctcttttagctgcttgtatggttcctatacatggaacaattatactggcctcmctgtgttatggtaaatatttaaggtcatatttgatattgctggtttgaattcagcttttccatttaaatacattataatgatgatgatgaaatcatgataatatttaacttatttttaaagtatattctgtacctttccaacaaaaaggttaaaagtcattgaaggctaaccttactgccttctttgtatcactgtcttctaaataattattatggctgggtacagtggctcacggctgtaatcccagcactttnggaggccgaggtgggcag

SEQ ID NO: 142 - DNA, 801 bp, Homo sapiens
  SITE (113): n equals a,t,g, or c
  SITE (380): n equals a,t,g, or c
  SITE (382): n equals a,t,g, or c
ataggtcacacagcaaaccagcaactaagccccctggtcccctaatctgccccagaaaggtagtttctcagctgttctgagcttgacagcatgaacatcctcaggagccacangcaaagtgggctgaggcttggcattcccctcgaggtcatctggccattctgaacgcccctcctcagcctgcttcctccggctgagccatgtgcccccggaacccctctgaactctgttgccgatccctccctccatctgcgccttcagtgaagcagtttcttaaaggaggggtccttggtaccgtggagggacaggacatctctgggaattcgtacccagctgcgttcgtgctgagttcttcatgacccacttccttccagcgtcangntggkggatccagggctgggtactgaagccgtactggaccagtgggccccctcccgggatcgctggacttggagcagaagagtccctccagggctgaagattggacacagaaaacttgggaactgtcaactgccctgttattcacctcgtgaaaaaagctggatttctaatgagagcgaatggaggtgacaattcccagaaactggaattgggatggtgagattttagttcagcgccggcggtctcatgcgtggaggtgataaagttgagctttgaggtggtcttcagagggagaggaataccctctgcgggcagagcttcctgggttccgggcccttccggacgtcaacacaggtccaaatcccttgggctcctccgcacaccctgggtgcaagaataaatccttctctctgccgccaa

SEQ ID NO: 143 - DNA, 457 bp, Homo sapiens
  SITE (389): n equals a,t,g, or c
  SITE (404): n equals a,t,g, or c
  SITE (421): n equals a,t,g, or c
  SITE (457): n equals a,t,g, or c
ttgctggaccactcattggctgaccacctgaatgaggattgtttgaacggctcccagctgctggtcaattttggcttgagcccgctgctcctctgacccctcgtcagtttgctctgctgtgcccagccctgctttatcagatcgacagccgcgtctgcatcggcgctccggcccctgcacccccagggatctactatctgccctgcttcagagtgccctggagtcctgttgctcagcctcccttctcccctatccctgctgctgctgcggctcctgggacctcgtctactacagcccttgctgggcttcctgggggccctggcggtgggcactctttgtggggatgcactgctacatctgctaccgcatgcacaagaagggcggcacanggaacctgggcggantaccagagaaggacctnggcccggggcttgtcaagtgctcggaggcctcttcn

SEQ ID NO: 144 - DNA, 408 bp, Homo sapiens
  SITE (210): n equals a,t,g, or c
  SITE (384): n equals a,t,g, or c
  SITE (392): n equals a,t,g, or c
  SITE (397): n equals a,t,g, or c
actaaaaaagaagagaaaacagattctcctttaaatcctccaaaaagaatgtggcatttaggttttaggacttctgaattataagataaaaagtatgttttaagccaattgagtttagggtaatttattacagctgcaacaggaaactaacacaacccactgcatgccaagtacagttatatgctgtgcacatgcaggtagcataccggnaaagttttggtttggttattttaaattgtaaggttaaataacctataatactgggcatataattaccatttatctccaggggttctttgggaacctaaaattcagagattgctagggaattaattttacttcccaaagttcaaattaaaactttattctgggccttttaactantgggcacncactntggccggggct

SEQ ID NO: 145 - DNA, 223 bp, Homo sapiens
  SITE (223): n equals a,t,g, or c
aattcggcagagcacaaataaactttaagctcctgaaattatgttatgtaaggtatttgagaaatttgaagtaaacttgaagaaggtaaatgaactcatcatagggaaggcacatacaattgaagggagaagatagtttgttcaagaaccaagtgaaggctagtgttttcagattccatacattattcctctgtagagttacaagctacattgtaatggaagn

SEQ ID NO: 146 - DNA, 532 bp, Homo sapiens
  SITE (455): n equals a,t,g, or c
  SITE (478): n equals a,t,g, or c
  SITE (484): n equals a,t,g, or c
  SITE (531): n equals a,t,g, or c
ggaccaacaaactggcttcccttgtgtatctgcttttgggcacaaaagaccatgtcttcatttcagcacaaaacagtgcacttcattgaggtgtgatataattgcttcaggagagagtttgctctgaaaatgtcttctcggccttcctgaagcaggctgcacgcttatttatattggcaccacatgctaatctcacgaatggccctgttccgccagtgggaggacaaatagctgttcttttgctcccgtgtccatggaaagctcccctttctccttgcatggttgccatagtaaccaaaaaaaaatagttcttcaaaatagggaaggaatctctcagggtacttggggaacttagcaaagtgagaacataagtaggcctcaattatcatagatgctggtgtaaatacctagttattaatagtcaaagcgggttgaaatttggtaggtgaattttnctgtcacttaagggagtaggggnaagatnggtgataggtcttaccttcaatcagtactacagttttcctgtaaccnt

SEQ ID NO: 147 - DNA, 382 bp, Homo sapiens
  SITE (59): n equals a,t,g, or c
  SITE (61): n equals a,t,g, or c
  SITE (87): n equals a,t,g, or c
cctacggggcctttgaagaaaaggggataaagaacgacaggcctgaggaccagttgagnanagagaaaaagaaaattcttttctccntctgtgaggtgtgcaacatccagctgaactctgcagcccaggctcaggtgcattccaacggcaaatcccaccgcaaacgagtgaagcagctgagtgatgggcagcccccaccacccgcccaggccagccccagcagcaacagcagcacaggtaaaatacatgagctgtttgtcacctctcgaaatatttgttacacccactgacatacacactggcacacacacatacacacatatgcacaatttgtatatgggtccagagacttcctgtatccccacaatgtgtgaacacttct

SEQ ID NO: 148 - DNA, 357 bp, Homo sapiens
caattcccagtcttcatttcccagccaccaaaggacatctcagcaacagagccattatccgagccccttctgttagaggggctgcgggagtragaggactgggcggccgtggctatttggcatacacaggcctgggtcgaggataccaggtcaaaggagacaaaagagaagacaaactctatgacattttacctggggatggagctcaccccaatgaatcctgtcacattaaaaccccaaggaattaaactcgctccccagatattaggaagagatttgttcagaaaaataactgggggacagccagtgttacccagcttgcattctggttatttgggacaaggacccaaaggacag

SEQ ID NO: 149 - DNA, 488 bp, Homo sapiens
tctctaaaaatatatataaaaagtaaaactaaagaacttcttgcctaaacctgaattaccgcaatttgctgagtgactttgagaaaaatcagactgtttagttcagtcgggatgaaaagcttgcgattgcttcccacaagaatgggcaatagtgacggctgcaaggtacttttatttgttcatgaaagaacgacaatttttcaaaatgtaattaaacataatagaatgttttaaactactgggcactgaaactggaagaaaaaggaggctttattgaacattcccctttttcagttggttcaaagttcagcactgtggttatcattggtgatgccagaaaacattagtagacttagacaattgctatggcagtttctaaacagagctttttctatacactatttgcaactggagtgcaatattgtatattctgtgttaaagaaataaagtatttttatcatttattaaaaaaaaaaaaaaaaaaaaaa

SEQ ID NO: 150 - DNA, 341 bp, Homo sapiens
  SITE (227): n equals a,t,g, or c
  SITE (315): n equals a,t,g, or c
  SITE (335): n equals a,t,g, or c
aattcggcagagttccagtacagtgtttaagatcagtggtgaactgggatatcccagccttgtttataatcccagcaggaagactttgagtttctcaccattatgagtgatgccagctgtaggttttttgtagatgttctttatgaagttgaggcagttcccctctatttctagtttgttggagtttttatcatgaatgggcattggatttctgccagatgcttttnctgcagctttctgttgacatgttcacatgattttccttctttagcctgttgatgcgatgggtcacattaattgattttggaatgttgnaccagccttgcatacctgtnaagaag

SEQ ID NO: 151 - DNA, 331 bp, Homo sapiens
  SITE (71): n equals a,t,g, or c
  SITE (258): n equals a,t,g, or c
  SITE (313): n equals a,t,g, or c
aattcggcacgagaaggggaagatgggtaacataggacattggggcttttttgtacttgctactgtttctnatcattaaagtcaaaaaggccgtctcagaatctgatggctcatatatagactctcagacagcctagtttgtcactcttcaacccttacttttttgtatattcatattcttctaaattctggctttaccacttaatttagtccttctgatatttatctctctttatactgacctccttgctatttttnggctttatcctatcagacaatacctctatcttccacttgcactatatccttctgnttcactaaataagccttg

SEQ ID NO: 152 - DNA, 331 bp, Homo sapiens
  SITE (325): n equals a,t,g, or c
aattcggcacgaggaaacaggagagggtatggctgcattaatggacattgtccacagacgcaaattttcctcagttaagacagttttgcaatgccacttctgcttgttggccagtggaaaccatttttaaatatgtcaaagaaatatatttgagggtaaaatattttgattttcttcagtccccactttgaaatttaaaacaagtttcacatactaaaagccaaggtaatagctttggggagatttaagttagaggtgtttagatagagacagtcatagcagtggaaaaacacatttgggwtaatataatgggcaawtttaaatntatcat

SEQ ID NO: 153 - DNA, 410 bp, Homo sapiens
  SITE (368): n equals a,t,g, or c
  SITE (388): n equals a,t,g, or c
  SITE (400): n equals a,t,g, or c
aattcggcacgagcttgatagcatttttatctttcttgatcatataataatggtatgccttacaattgatagcaccttagattttctgaaatacaagcatgagttcaaattcaccgtaatgaaagattgtaaattgggagacataatctccttcattgtgttattccttgttaaatcataaaaatacaccagtgtattgcgtatgttaaagataaatgccactttgaaattcaataagaaattttcttatagtyctgtaacatgttctttcaaaggggtagacataaattcactcatttagrcttacattcataaaggctaggattaccctatcmtataggaaatactattgtacctaagggattagngggacatttaaccttaaagnatttcctttaangcggtggcca

SEQ ID NO: 154 - DNA, 312 bp, Homo sapiens
  SITE (104): n equals a,t,g, or c
  SITE (201): n equals a,t,g, or c
  SITE (312): n equals a,t,g, or c
aattcggcacgagtggggttctattgctggggcttctgctttgttctgttgatcaatttatctagtcccatgctagtacttcatgaagtttttgtaatattttncttctccagaaaggccagcactccctcctccctccctgtcttctcacacttcataaatttatggtttcttttggttgtttattcatccatataaatnactgcattctaaaaaaacattttttggaattttggttggagttacgttgaagctatatatcgatttgaagactatgacatatttattgaggtttccagtccacaagatggn

SEQ ID NO: 155 - DNA, 362 bp, Homo sapiens
  SITE (351): n equals a,t,g, or c
aataataaataagcaatatttattacaacctccaactttcacatgagaaactaaggcttaggccgggtgcagtagtgtactcccagcacttagggaggccaaggcaggcagatcacctgaggtcaggaattcaagagcagcctggccaacatggcaaaactttggctctactaaaaatacaaaaattagtcaggtgtggtggcatgtgcctgtagccccagctactcaggaggctgaggcaggagaatcacttgaacttgggaggtggaggttgccgtgaactgagatcatgccactgcactccagcctgggcggcagagtgaactctgtcttcaaaaaaaaaaaaaaaanctcgggggggg

SEQ ID NO: 156 - DNA, 365 bp, Homo sapiens
gaattcggcacgagaaaaaaaccctctagtgtattgtttagatagactataacttatttywggattatccactacttgaattagttggagaacagctttcttttattaaggtgaccaatgcttttcaaaatagtattggcatcatctgatgacttgttagaaatgttgacccttggccaggcatggtggctcatgcctgtaatcctagcactttgggaggccaaagtgagtggatcacctgaggtcaggagttcmagaccagcctggccaacatggtgaactctgtctctactaaaatacaaaattagctatgggtggtggcgggtgctgtaatcccagtagtttggargcttaggcagagaatt

SEQ ID NO: 157 - protein, 90 aa, Homo sapiens
  SITE (16): Xaa equals any of the naturally occurring L-amino acids
KCISDFFQFLCVKGRXLYSRGGHPYLTGLAVAGGAYYLGLEGAIIGPILLCILVVASNIYSAMLVSPTEFSSHGQTRPHGLLSLSGELKQ

SEQ ID NO: 158 - protein, 31 aa, Homo sapiens
FLLSVIERADLICYLLFDLNYIYAHPYIYLY

SEQ ID NO: 159 - protein, 49 aa, Homo sapiens
MSVALPPLSYDSNKYFQTFVNVPGGQNHTRFRIINLKHLAQYLAQIRAQ

SEQ ID NO: 160 - protein, 34 aa, Homo sapiens
DKLINVEVNCFIKWAESWTVVYFILYKFQLKITK

SEQ ID NO: 161 - protein, 34 aa, Homo sapiens
LLRSCSKLSFVSGLNHQPRILNKADLILLPRSGL

SEQ ID NO: 162 - protein, 59 aa, Homo sapiens
TITLILCFFSKKMNVYSTKQMNKLLKKYTSWIMPTDKNEFILFVEQTDCSNYKNLYCPY

SEQ ID NO: 163 - protein, 58 aa, Homo sapiens
  SITE (48): Xaa equals any of the naturally occurring L-amino acids
  SITE (51): Xaa equals any of the naturally occurring L-amino acids
KYCRPSIPTLPIRKIRLRPQAWWHAAGSLSYLEGWSGEDHLNPGDQDXTLXHPGLYSW

SEQ ID NO: 164 - protein, 25 aa, Homo sapiens
  SITE (16): Xaa equals any of the naturally occurring L-amino acids
  SITE (21): Xaa equals any of the naturally occurring L-amino acids
NSARGDLLFHSIPPLXILMTXLVII

SEQ ID NO: 165 - protein, 73 aa, Homo sapiens
  SITE (50): Xaa equals any of the naturally occurring L-amino acids
  SITE (55): Xaa equals any of the naturally occurring L-amino acids
VPQRQIVLSSTMWLWKFNLSLNPPNSEKTAYFPCIPKRLCTGNIEECFVXTSRGXIPHAHFPRATRFRQLSKD

SEQ ID NO: 166 - protein, 46 aa, Homo sapiens
  SITE (8): Xaa equals any of the naturally occurring L-amino acids
PQPNPFRXPLSPQSGRQLHVLVLQCLHLPPGLQACFKGAGPDRCSG

SEQ ID NO: 167 - protein, 76 aa, Homo sapiens
DASTKIREIFHHAGIHNVTIQFENVDLKEPLEQKDLLLLCNSPCISKGCAKQLCCPPGALPLAHVNGCAEQMVGPL

SEQ ID NO: 168 - protein, 55 aa, Homo sapiens
  SITE (24): Xaa equals any of the naturally occurring L-amino acids
  SITE (30): Xaa equals any of the naturally occurring L-amino acids
  SITE (31): Xaa equals any of the naturally occurring L-amino acids
  SITE (33): Xaa equals any of the naturally occurring L-amino acids
  SITE (37): Xaa equals any of the naturally occurring L-amino acids
  SITE (42): Xaa equals any of the naturally occurring L-amino acids
  SITE (43): Xaa equals any of the naturally occurring L-amino acids
PNNNVNYTYSIILYITFYLYNNKXYHSHLXXAXLVYXYCLKXXYYLCTPGFCFLN

SEQ ID NO: 169 - protein, 46 aa, Homo sapiens
FKEIADADNHVPSTALSSQCVRNWWVLGLTDFKNEATDPRGWSAVT

SEQ ID NO: 170 - protein, 45 aa, Homo sapiens
  SITE (24): Xaa equals any of the naturally occurring L-amino acids
  SITE (43): Xaa equals any of the naturally occurring L-amino acids
  SITE (44): Xaa equals any of the naturally occurring L-amino acids
NIRTLPTQRRDMALFTVERNINKXKVAVLTHNYIKLTLVHAVXXF

SEQ ID NO: 171 - protein, 76 aa, Homo sapiens
  SITE (19): Xaa equals any of the naturally occurring L-amino acids
  SITE (65): Xaa equals any of the naturally occurring L-amino acids
  SITE (69): Xaa equals any of the naturally occurring L-amino acids
SLAKCWAKFCSPECSPAGXLRELTQLEVKTGTGPAVRCPFCAPTPRQLPFWCPCTPCIQLPHPMXPVFXSFVFSGS

SEQ ID NO: 172 - protein, 111 aa, Homo sapiens
  SITE (17): Xaa equals any of the naturally occurring L-amino acids
FGTSPGSHPKFASKSMXHRQRSVFYGTVLTGSAHISLGYSPWSQPAQIRRKVTCESEEVLEEVGEGSRSGLMECGPIYAAYVLLQAHLQPRLGSFSDAGNLSPVQVPLMFL

SEQ ID NO: 173 - protein, 41 aa, Homo sapiens
  SITE (39): Xaa equals any of the naturally occurring L-amino acids
  SITE (40): Xaa equals any of the naturally occurring L-amino acids
KDSDKGKGLSCFPSVIYNILQNTIGKKEGKSVIRERRVXXS

SEQ ID NO: 174 - protein, 65 aa, Homo sapiens
  SITE (61): Xaa equals any of the naturally occurring L-amino acids
DPFSTTEQLFIMKGRRRQREENIYLCGLLLSFLGMVGHSYWYVFFCCCCCCCCFLRRSLSXSPRL

SEQ ID NO: 175 - protein, 47 aa, Homo sapiens
SHARHVISSLDLDPSFFLLAVILFVPPTQPPGALGTLKSPEGSVRPR

SEQ ID NO: 176 - protein, 108 aa, Homo sapiens
  SITE (104): Xaa equals any of the naturally occurring L-amino acids
  SITE (105): Xaa equals any of the naturally occurring L-amino acids
GRPSQPLAVLSSPGLGVHGDPRGPPEAGIPWCLQEAELVHGSSWLSLAFPHPINPSPSHHPFFLSASTGVIKLKNNGDFFIANEGRRPSTSMDGRVCGSMGLRXXCVE

SEQ ID NO: 177 - protein, 32 aa, Homo sapiens
HFFLFSDSYLLTYLKDNDFLKYLYEIRALYSQ

SEQ ID NO: 178 - protein, 51 aa, Homo sapiens
  SITE (24): Xaa equals any of the naturally occurring L-amino acids
  SITE (30): Xaa equals any of the naturally occurring L-amino acids
  SITE (37): Xaa equals any of the naturally occurring L-amino acids
LGLNRFLTPYGNHCRKWGLTRPRXGKSRSXKNSYLPXVCAPEFFGGGGTFS

SEQ ID NO: 179 - protein, 82 aa, Homo sapiens
  SITE (60): Xaa equals any of the naturally occurring L-amino acids
  SITE (62): Xaa equals any of the naturally occurring L-amino acids
  SITE (70): Xaa equals any of the naturally occurring L-amino acids
  SITE (75): Xaa equals any of the naturally occurring L-amino acids
  SITE (80): Xaa equals any of the naturally occurring L-amino acids
RSISFATLTISSSDGVISPERPIRSAFTSLAVRRIFSAGTINAEIRQFRSCYIAAPHQRXFXPLFVGRSXFQGGXQHFAXGF

SEQ ID NO: 180 - protein, 36 aa, Homo sapiens
LQMGVLALKVGCPKGWGRRARGRPREVVHDTAYNRQ

SEQ ID NO: 181 - protein, 92 aa, Homo sapiens
  SITE (78): Xaa equals any of the naturally occurring L-amino acids
NVALGDIILQKNSLIVSDYFTVSFGNNITDTVIFAKVFEHFISFLCLLTCRSFFSEVPRIIILVNFLSSVVFWSCSLXSSFNSGFAVILASP

SEQ ID NO: 182 - protein, 58 aa, Homo sapiens
  SITE (15): Xaa equals any of the naturally occurring L-amino acids
  SITE (26): Xaa equals any of the naturally occurring L-amino acids
  SITE (53): Xaa equals any of the naturally occurring L-amino acids
ITHKGQVGPRAPLIXSGADCRSTWIXLLWFNLYDLVFCCSFCKYCWEPKPLVXDDGST

SEQ ID NO: 183 - protein, 75 aa, Homo sapiens
  SITE (13): Xaa equals any of the naturally occurring L-amino acids
  SITE (36): Xaa equals any of the naturally occurring L-amino acids
  SITE (48): Xaa equals any of the naturally occurring L-amino acids
  SITE (57): Xaa equals any of the naturally occurring L-amino acids
TSGPVQIAGEQYXGVLYNQWTTMESMWSTLCEMHFXQNQRIWPHYAVXAARVRESLXLEWCQVGSEAHLHVTGDV

SEQ ID NO: 184 - protein, 46 aa, Homo sapiens
  SITE (42): Xaa equals any of the naturally occurring L-amino acids
CISVNLVLVEVGKENPAGLIQIHRLKRDDYFNSCSGNCGISXLMLP

SEQ ID NO: 185 - protein, 61 aa, Homo sapiens
TKQPFKSSLSSAGALSSTNFGMHLICKISTITLRWSSTLQFDSRCSFHSILLPTHIKCFSP

SEQ ID NO: 186 - protein, 74 aa, Homo sapiens
  SITE (60): Xaa equals any of the naturally occurring L-amino acids
NQVTFWHPSRSKVLKIFGTFYLTKNVDAQVFWISSSTPVIQVASCVECPSHSCPALLAPXSYLPQKHCQGITPQ

SEQ ID NO: 187 - protein, 52 aa, Homo sapiens
  SITE (48): Xaa equals any of the naturally occurring L-amino acids
LRLTDHLTSCHGELQLLLNSILQCLLETWNLVLDFCGCLKYRACGSLXKVTC

SEQ ID NO: 188 - protein, 47 aa, Homo sapiens
  SITE (41): Xaa equals any of the naturally occurring L-amino acids
GSLPLKRSLCSGEGDPHPEREACMWERWWEGCTLKEEPGFXRKCSQF

SEQ ID NO: 189 - protein, 96 aa, Homo sapiens
  SITE (6): Xaa equals any of the naturally occurring L-amino acids
  SITE (70): Xaa equals any of the naturally occurring L-amino acids
  SITE (73): Xaa equals any of the naturally occurring L-amino acids
HPPNIXKPPIANSSWKLVVPCLTQMLGRFQPFSLVRSFRLGFEACCYPNQKCATQTIRPPDSRCLVQAVXQNXNFAKDVLDQWSQLEKDGLRGPYP

SEQ ID NO: 190 - protein, 90 aa, Homo sapiens
  SITE (87): Xaa equals any of the naturally occurring L-amino acids
ARGALSCTAYSCTRVSPAPPCMALAPWIRWPLPSLLTALLPPRYSCPSSLPLIVRGELALGVNKGIGLNSFWYSSFKETPCFGGFCXGWK

SEQ ID NO: 191 - protein, 38 aa, Homo sapiens
ALEKSSISLHLLYVLKLKSGFMLLPTSKIFRIQTCLEH

SEQ ID NO: 192 - protein, 45 aa, Homo sapiens
IPTFQFDQKQLTLSSLQLFIKCSLWADTAPGTSGTFILDELQSNL

SEQ ID NO: 193 - protein, 141 aa, Homo sapiens
  SITE (37): Xaa equals any of the naturally occurring L-amino acids
  SITE (107): Xaa equals any of the naturally occurring L-amino acids
  SITE (110): Xaa equals any of the naturally occurring L-amino acids
  SITE (112): Xaa equals any of the naturally occurring L-amino acids
  SITE (114): Xaa equals any of the naturally occurring L-amino acids
  SITE (115): Xaa equals any of the naturally occurring L-amino acids
  SITE (116): Xaa equals any of the naturally occurring L-amino acids
AAWALRSCWSRWAALGPSNCGMWHCWPCPECCYHCTXSCPSSWLPCLPTDVPCRVPLPTSAIRMCGWRPIFPGSLMARSAPASALPIPRLSPTPRWGKKGRAVGSWXMNXHXAXXXGWEYDHSEFSSTIATESQVGIYIIH

SEQ ID NO: 194 - protein, 117 aa, Homo sapiens
ESSSSCHGEEETATRKNSVMGTWYCSRLGRAEVEVDEDTMSSVKILYVRNLMLSTSEEMIEKEFNNIKPGAVERVKKIRDYAFVHFSNREDAVEAMKALNGKVLDGSPIEVTPSKTS

SEQ ID NO: 195 - protein, 151 aa, Homo sapiens
  SITE (84): Xaa equals any of the naturally occurring L-amino acids
  SITE (91): Xaa equals any of the naturally occurring L-amino acids
  SITE (109): Xaa equals any of the naturally occurring L-amino acids
  SITE (117): Xaa equals any of the naturally occurring L-amino acids
  SITE (143): Xaa equals any of the naturally occurring L-amino acids
  SITE (147): Xaa equals any of the naturally occurring L-amino acids
RLLRTRPGQCPSLQKPSGQLRQEELQTTACEAGVDFVYKTKLESVEVSASNPYVYYNTQLEDIIKSGTDPATPLAMKKFVSHAXCHDSLGXARTGIVPPSMGQKSELWXINLDYSYXLGKETSPSLWAANGNASRKIGGQWRXLGFXDPGA

SEQ ID NO: 196 - protein, 38 aa, Homo sapiens
WHDPVDKSLGLRVRLPGFVSEFFYLSSLGLCICIIHGN

SEQ ID NO: 197 - protein, 46 aa, Homo sapiens
  SITE (43): Xaa equals any of the naturally occurring L-amino acids
  SITE (46): Xaa equals any of the naturally occurring L-amino acids
NPGAFSFKNRQPKRKMNNDGNSWKRKLKWQNSILNGTEPWCDXKKX

SEQ ID NO: 198 - protein, 117 aa, Homo sapiens
VGVGLGIFLVAESHFGLLGLLENKFKVDSSSYFPGEKGLLYTISQSWCVSPHTNLKALKGVLVSLSTPGCLMNTQGPMNEGTFRICSTPCSFQGSVNPSYNIWQILLHHRGKLLNAH

SEQ ID NO: 199 - protein, 48 aa, Homo sapiens
RVVLCVHTWEFIFSSAYGRIPETSETFYGELRREYFLSQKVLPCEVCI

SEQ ID NO: 200 - protein, 56 aa, Homo sapiens
RQYKDKWLSEFGGREGASDEYGGAQRIFRQGKYVVVDTCHYTVVQTRRMYNTKKEV

SEQ ID NO: 201 - protein, 63 aa, Homo sapiens
  SITE (5): Xaa equals any of the naturally occurring L-amino acids
  SITE (6): Xaa equals any of the naturally occurring L-amino acids
TEKFXXNRNLFLTVLEAARSNIKMSADSVSDKVLLLINGTSVSLRGREGKKDKLTPPIPSIRH

SEQ ID NO: 202 - protein, 95 aa, Homo sapiens
FSWEIILLSGDVGRKVSSYAAEKQGPNSAPGCIVTVGGHSRVQASRAILGLTTGVGVSRWKEPQPMPLPPASLSGCVLILGQSTPSHGVEMAWRM

SEQ ID NO: 203 - protein, 61 aa, Homo sapiens
  SITE (61): Xaa equals any of the naturally occurring L-amino acids
IAKVKKRTNNFIYLFCLFFRQSLALSPGLECSGTISAHFNLPLPGSRDSRASLSLLSSWGX

SEQ ID NO: 204 - protein, 49 aa, Homo sapiens
IIYLLFELPFPHGARTQLRCILCGLVLVLFCHSPFSCRLFKKQTVSSVE

SEQ ID NO: 205 - protein, 35 aa, Homo sapiens
VIKWTNNEPLQNFQAEILRHLIIFHNCNFLRDHLC

SEQ ID NO: 206 - protein, 153 aa, Homo sapiens
  SITE (104): Xaa equals any of the naturally occurring L-amino acids
TKVVSQQPFVGYRGPRELSERKLVRNVRQSGDVYYNTGDVLAMDREASSTSATASGTPSDGRARTCPRTRWRACCRRWTSCNRLTCMACACQVVRVRWAWLLCXSPRPDFRRGEVVPARSRLAPCLRYPPFHPHPGRHGGHQHVQTDEDPVGA

SEQ ID NO: 207 - protein, 60 aa, Homo sapiens
VLEGTPTNLNRTLPSGIRGSQPLPQGQPPLPGRSSWETKTREPIPPPVRLEAREVGGVSL

SEQ ID NO: 208 - protein, 37 aa, Homo sapiens
  SITE (19): Xaa equals any of the naturally occurring L-amino acids
  SITE (33): Xaa equals any of the naturally occurring L-amino acids
IVTNFSPLPSFSGNLNSPXCLYEFVYSGQQDRXLSQE

SEQ ID NO: 209 - protein, 27 aa, Homo sapiens
RVTIGITLRLLYKSSTHKMLGGTNAKF

SEQ ID NO: 210 - protein, 148 aa, Homo sapiens
VVYTVLPLYHVMGLVVGILGCLDLGATCVLAPKFSTSCFWDDCRQHGVTVILYVGELLRYLCNIPQQPEDRTHTVRLAMGNGLRADVWETFQQRFGPIRIWEVYGSTEGNMGLVNYVGRCGALGKMSCLLRMLSPFELVQFDMEAADC

SEQ ID NO: 211 - protein, 80 aa, Homo sapiens
  SITE (77): Xaa equals any of the naturally occurring L-amino acids
  SITE (78): Xaa equals any of the naturally occurring L-amino acids
  SITE (79): Xaa equals any of the naturally occurring L-amino acids
HSPIYRHCPGLVLNRHGLGTCDNYGRCNLLQNKRSGVLCTSVILGLGCVCPLRRLFAYTVVNPVTVIVSTCCNYKVXXXL

SEQ ID NO: 212 - protein, 62 aa, Homo sapiens
DTTLRFCYSCSKLSLNAVSKGNCGANTCTREVNKRRTGGTTGHTIKVTSSEDGRILTNDFNA

SEQ ID NO: 213 - protein, 65 aa, Homo sapiens
HYRRYACRYRFRNSRVDPRVRPCLIIKSFAFPQHPEYRLPLHLLKQLNCEALSGLGLLFNLSEIL

SEQ ID NO: 214 - protein, 65 aa, Homo sapiens
  SITE (35): Xaa equals any of the naturally occurring L-amino acids
AAAPIPGVVHLSPAQWMVQTQGRSELKAKEGLRDXFLHLMSQPLLAFDFPSAASSLLSTIRELKR

SEQ ID NO: 215 - protein, 67 aa, Homo sapiens
  SITE (11): Xaa equals any of the naturally occurring L-amino acids
  SITE (12): Xaa equals any of the naturally occurring L-amino acids
  SITE (25): Xaa equals any of the naturally occurring L-amino acids
IVGVFCIHVEXXKGCLMKHYGLPWXRTEEAAAGKKRPLCSSQPHCWCPMHCLALPEESLGNRARLHL

SEQ ID NO: 216 - protein, 79 aa, Homo sapiens
  SITE (54): Xaa equals any of the naturally occurring L-amino acids
SNNRQLKSPLSPTRALTGTPDDTEPACLCCSLPTLLSLHMVSSELNYCIHLTLXASSFLGTPSLHPSRTIFEVSWLITT

SEQ ID NO: 217 - protein, 88 aa, Homo sapiens
  SITE (73): Xaa equals any of the naturally occurring L-amino acids
HPQLSVLGAPTHARSHKGSKESPSQHLSCGPGQITVSLRASGSEMEKPGVLWEPSGQVGLPGGGKESRGRWAXGAVCTRKCGAVSGGT

SEQ ID NO: 218 - protein, 78 aa, Homo sapiens
QYICRLNRSDSDSSTLAKKSLFVRNSTERRSLRVKRTVCQSVLRRTTQECPVRTSLDLELDLQASLTRQSPSMMSCRR

SEQ ID NO: 219 - protein, 73 aa, Homo sapiens
  SITE (24): Xaa equals any of the naturally occurring L-amino acids
  SITE (69): Xaa equals any of the naturally occurring L-amino acids
LAYYMQTSQCPFQWLKGRIPCCVXNFSSLAMRLKFRFTLLLISYLIFGNLISLNLSFISKMGIIVYLIXFGEN

SEQ ID NO: 220 - protein, 50 aa, Homo sapiens
  SITE (46): Xaa equals any of the naturally occurring L-amino acids
GRGKSFTQSFCNLTFNSPGLQGRTMTQLERYFLLRVIVIFDNSKKXKKKT

SEQ ID NO: 221 - protein, 67 aa, Homo sapiens
  SITE (8): Xaa equals any of the naturally occurring L-amino acids
  SITE (18): Xaa equals any of the naturally occurring L-amino acids
DFGRTGRXPGRPTRPLIXYPYNFYPVLKLMYDFIIFFYCNICVSRDNCVLSTRIINTLKNFFIVFPT

SEQ ID NO: 222 - protein, 60 aa, Homo sapiens
  SITE (17): Xaa equals any of the naturally occurring L-amino acids
  SITE (22): Xaa equals any of the naturally occurring L-amino acids
SIPFLGECDYYFSIIVXSGGEXHRLPLGSALIMSLTLQVRKKVRVLPAAMCVHYTFKKRQ

SEQ ID NO: 223 - protein, 80 aa, Homo sapiens
  SITE (71): Xaa equals any of the naturally occurring L-amino acids
  SITE (74): Xaa equals any of the naturally occurring L-amino acids
CLLLTSLRSHTASFGTILLSYTGQPCSLWKETEGVRCPEVNLIGYHPAGGLPLCSIQITALPFLNSQQLLXLRXKFTFCT

SEQ ID NO: 224 - protein, 56 aa, Homo sapiens
  SITE (20): Xaa equals any of the naturally occurring L-amino acids
  SITE (56): Xaa equals any of the naturally occurring L-amino acids
NLSSTQNHNIWQNSPNPHSXVVGSFVSRDFIMSLFLHHDLNKGRYVKFLTLLGGVX

SEQ ID NO: 225 - protein, 86 aa, Homo sapiens
  SITE (10): Xaa equals any of the naturally occurring L-amino acids
  SITE (48): Xaa equals any of the naturally occurring L-amino acids
PEFPGRPTRXLGPSPAGPVGINPAPFTRPTGTLGLNPASFPRMNGPAXKSFVPFPRVGSLPGTNPAAFPRPGGPMAAMYPNGMLPP

SEQ ID NO: 226 - protein, 68 aa, Homo sapiens
  SITE (6): Xaa equals any of the naturally occurring L-amino acids
DFLSTXYVKKSILPHPPQKTFMLVLHFISPVSVKRLKCPLQLKHFLSLNYKIDFAIWKMSMPVFIHFV

SEQ ID NO: 227 - protein, 61 aa, Homo sapiens
  SITE (50): Xaa equals any of the naturally occurring L-amino acids
  SITE (53): Xaa equals any of the naturally occurring L-amino acids
LFECPFYVYIFITYTPPIHRKDSDVFSGTIHKNAHAETITIIKNTGLKIXVLXFGIHTSYT

SEQ ID NO: 228 - protein, 57 aa, Homo sapiens
  SITE (9): Xaa equals any of the naturally occurring L-amino acids
  SITE (13): Xaa equals any of the naturally occurring L-amino acids
  SITE (14): Xaa equals any of the naturally occurring L-amino acids
  SITE (17): Xaa equals any of the naturally occurring L-amino acids
  SITE (34): Xaa equals any of the naturally occurring L-amino acids
  SITE (53): Xaa equals any of the naturally occurring L-amino acids
  SITE (56): Xaa equals any of the naturally occurring L-amino acids
TQEMCWLGXEVTXXVWXCSLRADLENSETLQVNXLQGESPEELFSHTMTWPRXKFXG

SEQ ID NO: 229 - protein, 50 aa, Homo sapiens
LQERGIIATCLFPSVENLCWLRAEKRRKDSRLREARCRKEEVRLKGVRLA

SEQ ID NO: 230 - protein, 70 aa, Homo sapiens
GTPFSSLVSPKHNLSKPFSTTKSKQSRVRWLTPVNPSTLGKAGGSGSLGVRVPDQPDQNGETPSLLKIQN

SEQ ID NO: 231 - protein, 72 aa, Homo sapiens
  SITE (2): Xaa equals any of the naturally occurring L-amino acids
KXETLSQKKKKKKKKPYVLAGWIPLLPLLNSGHRMLALPLMLPLETGFSCGCCSHHHNYGGEFHHCIFESLL

SEQ ID NO: 232 - protein, 66 aa, Homo sapiens
EFRGKTIRLHTLNLFMWACHTASLPAFVCTEAKTFVQMLIGKASDFKTWFFFLSIKKSFIQGCLLG

SEQ ID NO: 233 - protein, 44 aa, Homo sapiens
KQRAGVSVRTTTLSNFATSFLSISTDEKLTTPNCSSFNFKIAAF

SEQ ID NO: 234 - protein, 59 aa, Homo sapiens
TLNSGPGTLKSGTGFPVLYPGTHSWGPEPWDSGLKFQDLDCGIPRGLNPSLGLKSLLQT

SEQ ID NO: 235 - protein, 79 aa, Homo sapiens
  SITE (65): Xaa equals any of the naturally occurring L-amino acids
GKTQLPWPLSVCARAPLQALGAASRKGTQILRLRGGRYPICSPRPFSREGFNLFRVIYLAFSIFXFAFDTPMFNCIFRK

SEQ ID NO: 236 - protein, 40 aa, Homo sapiens
HFGRPRWVDHLRSGVRGQPGRHGKTPTLLEIQKLARHGGT

SEQ ID NO: 237 - protein, 68 aa, Homo sapiens
  SITE (63): Xaa equals any of the naturally occurring L-amino acids
LERLFQAMRGSGGQICLIIPQAGIHINADLKVHLQSILSEACYLGGFIWHNKTSVSTTLIATXTFPFY

SEQ ID NO: 238 - protein, 84 aa, Homo sapiens
  SITE (1): Xaa equals any of the naturally occurring L-amino acids
  SITE (8): Xaa equals any of the naturally occurring L-amino acids
  SITE (10): Xaa equals any of the naturally occurring L-amino acids
XSYLVTLXTXQPDRYRSGNSRAALGITNLFYWFWKISKKPEFIIITVSTPLPSQLCKIIIEVLMILIKKTLDKGNSTFRVDCLP

SEQ ID NO: 239 - protein, 51 aa, Homo sapiens
  SITE (37): Xaa equals any of the naturally occurring L-amino acids
  SITE (38): Xaa equals any of the naturally occurring L-amino acids
CLGVGSGRGKSSHPKGHTLSCLCHFLVQNKVTALILXXKKKKKKKKKKKKK

SEQ ID NO: 240 - protein, 161 aa, Homo sapiens
  SITE (15): Xaa equals any of the naturally occurring L-amino acids
  SITE (82): Xaa equals any of the naturally occurring L-amino acids
  SITE (150): Xaa equals any of the naturally occurring L-amino acids
SRPSASFGKLTTLVXADAEAFTAYLEAMRLPKNTPEEKDRRTAALQEGLRRAVSVPLTLAETVASLWPALQELARCGNLACXSDLQVAAKALEMGVFGAYFNVLINLRDITDEAFKDQPPAGSQDPGCTGAGLLGDPAGVTVREPLRLCXPSLAHPQRAEL

SEQ ID NO: 241 - protein, 88 aa, Homo sapiens
ESRVPISRPPWPATIQPGLSLLRAPSPCGSATRSGRDAGEWNLYYPMQLDLEYVRSGWDNYEFDINEVEEGPVFAMCMAGAHDQGDDG

SEQ ID NO: 242 - protein, 52 aa, Homo sapiens
LTFAKCFGGVKRGSNEKSKMVPTSRINYLFLVTQSHNPLETKPTSTPDFDHR

SEQ ID NO: 243 - protein, 67 aa, Homo sapiens
AFPSVPAAVRNKRLVFAPPKLFGKVLCHPCVYLSIFQHPKQSVLQLGLYNVFENLLLVSASQKVTPK

SEQ ID NO: 244 - protein, 57 aa, Homo sapiens
VNQLTPQFSQRSLDIKTSFLACFSDPVEMKIDIHSHILPKEWPDLKKQTLRQGFRCK

SEQ ID NO: 245 - protein, 120 aa, Homo sapiens
  SITE (90): Xaa equals any of the naturally occurring L-amino acids
  SITE (94): Xaa equals any of the naturally occurring L-amino acids
  SITE (96): Xaa equals any of the naturally occurring L-amino acids
EDPKCESAQGTAQQALPGAASPLPLQPSSRKLSWLLAWTPETPAEIVALEHKETRCTLMRRGDNWMLMLRDTIEDLSRQWRSHALNTSQXPGWXWXSLGFRSQEDAPSELPCAPSPLSVG

SEQ ID NO: 246 - protein, 57 aa, Homo sapiens
IHWKLSMTNSSTDSVVHHKGIYGIYTFITVISVNLKCNIFCHCFPSLFICLVFTAIS

SEQ ID NO: 247 - protein, 57 aa, Homo sapiens
FGVRVQGRGKSRDEEKCRRQPKAGKRGQRWHLSVPGRTWATGQRPKEMEARKEASRN

SEQ ID NO: 248 - protein, 64 aa, Homo sapiens
  SITE (49): Xaa equals any of the naturally occurring L-amino acids
FYLMIGVCGFIVFSSFIVSYLCLLGARGLNKHVYICVCTYTYTHTEASXEDSLKLHSPRLSPGC

SEQ ID NO: 249 - protein, 79 aa, Homo sapiens
LMKGRSVRDGTFRRAQRRSFTPASFLEEDTTDFPDELDTSFFAREGILHEELSTYPDEVFESPSEAALKDWEKAPEQAD

SEQ ID NO: 250 - protein, 51 aa, Homo sapiens
  SITE (2): Xaa equals any of the naturally occurring L-amino acids
  SITE (10): Xaa equals any of the naturally occurring L-amino acids
  SITE (11): Xaa equals any of the naturally occurring L-amino acids
  SITE (14): Xaa equals any of the naturally occurring L-amino acids
  SITE (23): Xaa equals any of the naturally occurring L-amino acids
IXLQIQCNSXXNSXRHFGRNLQXDSTIYMVMSMIKNNKIAILFFYNIAILL

SEQ ID NO: 251 - protein, 58 aa, Homo sapiens
LLTEQTIQMALPHLCCPNEFWCPHSSRQKKKKNTHNFFFYSSFCMLVLGIKRGPELHL

SEQ ID NO: 252 - protein, 70 aa, Homo sapiens
  SITE (5): Xaa equals any of the naturally occurring L-amino acids
CLCLXFKVNFYHDHTKIIICSQNEEYLLTYINEDRISTTFRLTTLLMSGCSSELKNRMEYALNMLLQRCN

SEQ ID NO: 253 - protein, 76 aa, Homo sapiens
GEVWEILLFALKYSAIRILDTLQNTSNLPAFEPCVNNEKLVYLKAGFSLATGVGCNCVSKKLPFAFPNSMTTGIVI

SEQ ID NO: 254 - protein, 116 aa, Homo sapiens
  SITE (51): Xaa equals any of the naturally occurring L-amino acids
LWHPGSRISERASGGRDFGETVLQRRKGEEIHNTPTPTPPRQQSSFTRCSXSVPNRGPHRYPTFYIRRKTGKNIKLKKSSGFHYCVDSCFFKHLQILIFLLLLFSSIAVVAGKSYL

SEQ ID NO: 255 - protein, 54 aa, Homo sapiens
SVAYGSDGRRPVHLWPASDGRRPSSKYRSWCESQGMTDISQKVRDCLFMTILGT

SEQ ID NO: 256 - protein, 133 aa, Homo sapiens
  SITE (20): Xaa equals any of the naturally occurring L-amino acids
  SITE (21): Xaa equals any of the naturally occurring L-amino acids
  SITE (106): Xaa equals any of the naturally occurring L-amino acids
ASDSIAGCSSLNQKQKELLXXECVEAQFSEAPVDLDASEPQACLNLPGLDLPGTGGDQKSTRVSDVFLPSEGFNFKPHKHPELPTKGKDVSYLPGTCFLSHLLFAXSATFTDVGIPMDSCFWTFFPGETRGFC

SEQ ID NO: 257 - protein, 88 aa, Homo sapiens
  SITE (87): Xaa equals any of the naturally occurring L-amino acids
LNGYMTKNYFILEKELTKEANLGPVPQDSATEPRAGPDAKDILSFCKYLIFFVVSSTTECGNNFQLSFLLGCLAVKILKDSYVFTLXK

SEQ ID NO: 258 - protein, 52 aa, Homo sapiens
RVYHYPQPHTSTHFNPAQYSQYCHTASRLDTSAFHRDGVSLLLHKLVLNSWA

SEQ ID NO: 259 - protein, 113 aa, Homo sapiens
  SITE (110): Xaa equals any of the naturally occurring L-amino acids
TLGADVGHVSGTERLPVRAHASLRTLPAQWWAHTHRPLSRALRKGQPGQQNSRAWGPRQEASGHPAATVGGSRWAAQEASGHPAAMVGGSGLVPLAQGPSRAFHPARGPXPPS

SEQ ID NO: 260 - protein, 104 aa, Homo sapiens
HFGRPRRVDHEVGVGDQPGQRGETLLKIQKKKKIGRAWWWVPVIPGTWKAEAGESLEPGGEGCGEPRSCHCTLAWVTRARLRLKKKKKKKKRSRDRETGSHCVA

SEQ ID NO: 261 - protein, 60 aa, Homo sapiens
  SITE (43): Xaa equals any of the naturally occurring L-amino acids
  SITE (59): Xaa equals any of the naturally occurring L-amino acids
AKRGSYLPQLHSDISPPSRTLLQERRVWPSSWWCILSKKEKNXLYIVQSVSTVLLRKMXV

SEQ ID NO: 262 - protein, 125 aa, Homo sapiens
IEMFHKSLERAEAGDNLGALVRGLKREDLRRGLVMVKPGSIKPHQKVEAQVYILTWDMACRIILPPEKELAMPGEDLKFNLILRQPMILEKGQRFTLRDGNRTIGTGLVTNTLAMTEEEKNIKWG

SEQ ID NO: 263 - protein, 39 aa, Homo sapiens
ANSEERTCPKVCIISDLLELLVFLETVSLLRTSLLINCW

SEQ ID NO: 264 - protein, 53 aa, Homo sapiens
  SITE (46): Xaa equals any of the naturally occurring L-amino acids
RHLTMNPVTFPGLLQRFCLSPCYICLKYKHSISMLPEKQMWADWLXLAAMVFL

SEQ ID NO: 265 - protein, 66 aa, Homo sapiens
VDNRLYSLYWHVLQIWVPLLKIIISDLHGVFPSPTSPVICFASIPLTVEKYKRAFLTTFLPTFLPL

SEQ ID NO: 266 - protein, 72 aa, Homo sapiens
AKPQQTKDILGTCYVCCTAERFVVYTTSKSCKRSISVLSFSAIDRPTIIAFSFAIKRWLIHKHSYSCVANAK

SEQ ID NO: 267 - protein, 61 aa, Homo sapiens
LRLLKCLEGEKVETIDSLDALSPICISAFSIFTGMGGDSWQDSFCSETIYVRIGYGQMRSL

SEQ ID NO: 268 - protein, 54 aa, Homo sapiens
QPGLDTLKRLCADSQSSLLGSGTIVLVSGEVPEFDVSRILFLVSLRQAGNKGCF

SEQ ID NO: 269 - protein, 95 aa, Homo sapiens
SRHGAGLIAVKFRKGLGLKILKHEQCILPYKIHLLGRVFLQVPGLTLLAGEAVQAVEALLQGCLQLLLVRVRVFRGGCSQFLLEYSHIESQQSPI

SEQ ID NO: 270 - protein, 39 aa, Homo sapiens
  SITE (12): Xaa equals any of the naturally occurring L-amino acids
  SITE (21): Xaa equals any of the naturally occurring L-amino acids
  SITE (28): Xaa equals any of the naturally occurring L-amino acids
  SITE (38): Xaa equals any of the naturally occurring L-amino acids
VLGSPGDFLPWXGGLEPSGFXYRVVLDXRSLLCLFYPXW

SEQ ID NO: 271 - protein, 78 aa, Homo sapiens
RPTRPVSGQILLSLALRKPTVGHLLPSTLDQFPLLDAFILPSSYSQLLILLSNYALSYLILVSGLPTRITTLWESWVI

SEQ ID NO: 272 - protein, 70 aa, Homo sapiens
  SITE (15): Xaa equals any of the naturally occurring L-amino acids
  SITE (16): Xaa equals any of the naturally occurring L-amino acids
  SITE (18): Xaa equals any of the naturally occurring L-amino acids
  SITE (70): Xaa equals any of the naturally occurring L-amino acids
SSFFWKLQGLCPGRXXQXLRQHSGEEQIHICIVLQLGSGHSGVVTEDMTVISSLPISETPPWSPLWDTAX

SEQ ID NO: 273 - protein, 32 aa, Homo sapiens
TDRLSSGWSTRVSCPGSRGSHSIHLRFPSRHP

SEQ ID NO: 274 - protein, 69 aa, Homo sapiens
GDLGQGFLTGLLYWTRAPQAQVRRLFLLSPFPPISSGTPSPANSILGMFLESAQSLPSPVLSPSRGQGS

SEQ ID NO: 275 - protein, 76 aa, Homo sapiens
  SITE (5): Xaa equals any of the naturally occurring L-amino acids
  SITE (22): Xaa equals any of the naturally occurring L-amino acids
  SITE (60): Xaa equals any of the naturally occurring L-amino acids
  SITE (72): Xaa equals any of the naturally occurring L-amino acids
VARAXGCSPGRWRVGAEGTCEXVLLYYGILPFLSRLWPGLNSKAYLCRNEGNILDVESKXLKVKEPFLDTLXSGYQ

SEQ ID NO: 276 - protein, 74 aa, Homo sapiens
FRLIKICRGWLHNSQGPVQNENSGPKVGVGKLIFLCHGPTISTHSGGQPKGLLPVCQDAQRHLDDGWARGYHWF

SEQ ID NO: 277 - protein, 100 aa, Homo sapiens
  SITE (75): Xaa equals any of the naturally occurring L-amino acids
  SITE (84): Xaa equals any of the naturally occurring L-amino acids
GRRGSGQYPKASELPERLQCCHPRLMLHTADSACDPNNKRLRQIKDQILTDSRYNPRILFQLLLDTAQFEFILKXDVQANAFRXANQMGALQERGFGADD

SEQ ID NO: 278 - protein, 87 aa, Homo sapiens
RPASLTLFLGTCHSLGRSIFPGSNPSELGGDLRAWQSFHMLTGTIGSLISFLYKQNTEPFQMDSIGKQTGQKIMFRHGFPEILFVFH

SEQ ID NO: 279 - protein, 125 aa, Homo sapiens
HCPGEAPGSPPTRRAFRSSQLHLGPAGRPPGAAVAIATHAGPRFTVYQALGRLWRERPSLLPQVTAVHRAGPRRVLRSGAGTGRARSVLCALGMGPGKAEPQGDPDVEPCDRSLRLKRPRRRQRR

SEQ ID NO: 280 - protein, 98 aa, Homo sapiens
LNGIKHSNCPSHQNYISNHLGMLRGKVLTPAFEKYFIIFILRQNSVYCDGQNSLLYLGVHLSSFQYFHIVHKCVWGLPCLENMDIALFSFESNYILRT

SEQ ID NO: 281 - protein, 150 aa, Homo sapiens
  SITE (108): Xaa equals any of the naturally occurring L-amino acids
HELPSKLLVYLSVRYAGRRLTQAGTLLGTALAFGTRLLVSSDMKSWSTVLAVMGKAFSEAAFTTAYLFTSELYPTVLRQTGMGLTALVGRLGGSLAHWRLAGWSVAVXAQAYLWGDRPTGLPAPPSCCQRRGRHSCQRPSRDVGEKERWC

SEQ ID NO: 282 - protein, 79 aa, Homo sapiens
PCDQGVNSAWSRLWRAVVKSLRPPISQYDFGNCPEVWAVSEGLLAKERSLLQKQHPCCVLGQGDPWLQGLLHTALPLAG

SEQ ID NO: 283 - protein, 46 aa, Homo sapiens
TDLCICKLHGCPSVWSMETDLSYSQCSCLGFGGLFRILTEYFFKKY

SEQ ID NO: 284 - protein, 57 aa, Homo sapiens
TSEEYRTLIIYCGTGNFMNMEWAHMFIFSSVNLKNCYCLGKLYQCIGTQIKRTFCLS

SEQ ID NO: 285 - protein, 58 aa, Homo sapiens
  SITE (52): Xaa equals any of the naturally occurring L-amino acids
MNLGSEPSMCLIFFCALVSLNSRGIKFWWGMRGVLGESLKIALLEMEGTQSXPQAHLD

SEQ ID NO: 286 - protein, 50 aa, Homo sapiens
  SITE (6): Xaa equals any of the naturally occurring L-amino acids
DSILNXIKPLMRRTMKKEKTSLTNVEVKRISQKLMRRYYKNLMSVHLKFR

SEQ ID NO: 287 - protein, 36 aa, Homo sapiens
  SITE (31): Xaa equals any of the naturally occurring L-amino acids
RLTLLPSLYHCLLNNYYGWVQWLTAVIPALXEAEVG

SEQ ID NO: 288 - protein, 73 aa, Homo sapiens
  SITE (11): Xaa equals any of the naturally occurring L-amino acids
  SITE (12): Xaa equals any of the naturally occurring L-amino acids
  SITE (13): Xaa equals any of the naturally occurring L-amino acids
VLHDPLPSSVXXXDPGLGTEAVLDQWAPSRDRWTWSRRVPPGLKIGHRKLGNCQLPCYSPREKSWISNESEWR

SEQ ID NO: 289 - protein, 140 aa, Homo sapiens
  SITE (118): Xaa equals any of the naturally occurring L-amino acids
  SITE (123): Xaa equals any of the naturally occurring L-amino acids
  SITE (129): Xaa equals any of the naturally occurring L-amino acids
GLFERLPAAGQFWLEPAAPLTPRQFALLCPALLYQIDSRVCIGAPAPAPPGIYYLPCFRVPWSPVAQPPFSPIPAAAAAPGTSSTTALAGLPGGPGGGHSLWGCTATSATACTRRAAXGTWAXYQRRTXARGLSSARRPL

SEQ ID NO: 290 - protein, 53 aa, Homo sapiens
  SITE (41): Xaa equals any of the naturally occurring L-amino acids
KVCFKPIEFRVIYYSCNRKLTQPTACQVQLYAVHMQVAYRXSFGLVILNCKVK

SEQ ID NO: 291 - protein, 39 aa, Homo sapiens
GRHIQLKGEDSLFKNQVKASVFRFHTLFLCRVTSYIVME

SEQ ID NO: 292 - protein, 68 aa, Homo sapiens
LLQERVCSENVFSAFLKQAARLFILAPHANLTNGPVPPVGGQIAVLLLPCPWKAPLSPCMVAIVTKKK

SEQ ID NO: 293 - protein, 95 aa, Homo sapiens
  SITE (19): Xaa equals any of the naturally occurring L-amino acids
  SITE (20): Xaa equals any of the naturally occurring L-amino acids
  SITE (29): Xaa equals any of the naturally occurring L-amino acids
YGAFEEKGIKNDRPEDQLXXEKKKILFSXCEVCNIQLNSAAQAQVHSNGKSHRKRVKQLSDGQPPPPAQASPSSNSSTGKIHELFVTSRNICYTH

SEQ ID NO: 294 - protein, 88 aa, Homo sapiens
EDWAAVAIWHTQAWVEDTRSKETKEKTNSMTFYLGMELTPMNPVTLKPQGIKLAPQILGRDLFRKITGGQPVLPSLHSGYLGQGPKGQ

SEQ ID NO: 295 - protein, 65 aa, Homo sapiens
NWKKKEALLNIPLFQLVQSSALWLSLVMPENISRLRQLLWQFLNRAFSIHYLQLECNIVYSVLKK

SEQ ID NO: 296 - protein, 34 aa, Homo sapiens
SQQEDFEFLTIMSDASCRFFVDVLYEVEAVPLYF

SEQ ID NO: 297 - protein, 48 aa, Homo sapiens
  SITE (25): Xaa equals any of the naturally occurring L-amino acids
  SITE (43): Xaa equals any of the naturally occurring L-amino acids
ILALPLNLVLLIFISLYTDLLAIFXLYPIRQYLYLPLALYPSXSLNKP

SEQ ID NO: 298 - protein, 49 aa, Homo sapiens
WTLSTDANFPQLRQFCNATSACWPVETIFKYVKEIYLRVKYFDFLQSPL

SEQ ID NO: 299 - protein, 59 aa, Homo sapiens
IRHELDSIFIFLDHIIMVCLTIDSTLDFLKYKHEFKFTVMKDCKLGDIISFIVLFLVKS

SEQ ID NO: 300 - protein, 65 aa, Homo sapiens
  SITE (35): Xaa equals any of the naturally occurring L-amino acids
NSARVGFYCWGFCFVLLINLSSPMLVLHEVFVIFXFSRKASTPSSLPVFSHFINLWFLLVVYSSI

SEQ ID NO: 301 - protein, 72 aa, Homo sapiens
AGCSSVLPALREAKAGRSPEVRNSRAAWPTWQNFGSTKNTKISQVWWHVPVAPATQEAEAGESLELGRWRLP

SEQ ID NO: 302 - protein, 54 aa, Homo sapiens
PMLFKIVLASSDDLLEMLTLGQAWWLMPVILALWEAKVSGSPEVRSSRPAWPTW

SEQ ID NO: 303 - DNA, 325 bp, Homo sapiens
gaaagctgataatatgctaaaaagcatagtgtattaaagaatgcacattgtattagaaatgtatttcagattttttccagtttttgtgtgttaaaggtcgtgctctttattccagaggtggccatccttacctgacaggcttggcagtggccggtggagcatactacctaggcctggaaggagcaatcatcggtcctattcttctctgcatacttgtggttgcttccaatatctatagtgccatgctagtgagtcccacgaattcagttcccacgccaaaccagaccccatggcctgctcagcctcagcggtgagttaaagcaga

SEQ ID NO: 304 - DNA, 319 bp, Homo sapiens
aggtgatgatatgctaaaaagcatagtgtattaaagaatgcacattgtattagaaatgtatttcagattttttccagtttttgtgtgttaaaggtcgtgctctttattccagaggtggccatccttacctgacaggcttggcagtggccggtggagcatactacctaggcctggaaggagcaatcatcggtcctattcttctctgcatacttgtggttgcttccaatatctatagtgccatgctagtgagtcccacgaattcagttcccacgccaaaccagaccccatggcctgctcagcctcatcggtgagttaaagc

SEQ ID NO: 305 - DNA, 325 bp, Homo sapiens; identical to SEQ ID NO: 303

SEQ ID NO: 306 - DNA, 4915 bp, Homo sapiens
catgatttggaatcaagtggtcacgtgatttttctgaatcacgatatgacactgtttatttactctttctttttatctttgggcattccagaggggtgtttgatgcttccctcaaaatggctggcttctatggattgtatacctggctgactcatactatgtttggcatcaatattgtcttcataccatcaggtaacaaccatattgtaccttccactattcgctatttaaggaaagttaagccattttacatatatctaggaaatgtctacttcctcaagtttaaaaaactgaattttttggcttgagatcgaatctagtccacattaggaacagaaatatgatttgtaatgtgtttgtttattgctgtatccccagcagctggaaccatacccagcacatagaaaaaattgctgtattagtctgttctctcactgctataaagaaatacctgagattaggtaatttataaagaagaggtttaattggctcacggttctgcaggctgtacaagaagcatagtggctcctgctttgggggaggcctcaggaaacttataatagtggtggaaagtaagggggaagcaggcatgtcttacatggctggagcaggaggaagagaggggagaggtgctaccacagttttaaacaaccagatctcacgataactcattcattcactatcatgagaacagcacctaggggtgaaatccacccgccatgatccagtcacctctcaccaggttttacctccaacattggggattacaatttgacatgggattttggtggggacacagatccaaacccgtatcagttgccctacatgtttgttcaatgaatgaatgttctagcacttagcataacacctaggacataattggctctcagtaacgtttgaattgaactgattggcagggagcaacgtgttgtcaaaatagctttgtccatgagggattacatcccagggcaagatgaatgcttctgagggcacataagctgcctccatacctcttaagatctgttgtggtgcttcttctacttttccttcctttatttctatggctgcttgttttcctaaatatctctgccttccacatttgcctctaccacatcccccactttccctatttgtctgtgcttccttctacattgtcaagttcattcacgttcttctctactgtgatgtccacaaacctaccctctgacctgcaagcaccctgtgaggcgggatggtagacttgtcatatagatgagagaccagttttccaaggtcatgtacctggcttctggtaggaccagaactagaaactacatttgctttactcttaacttggagagaagccagatggaggaagagtgcttgaacatactgctctggaagggaatgaccttgaagcagggtccttcaactcaggattttttctgtttatttttattatgctgaggtttagaaactaatttctgattgggctttggactcagtacaagttttgacacatgttctgtaggtgtatttataggaccgtatattaactattgattgatagtagcaactacagaacccttgaattttattgcttaagaagagatccataaataagacacacacttagaaagatttttagtatcacattttaagatattgagcctttacttagctagaaaattcagttagatagggcatatcatttccctaatatttgagtttgtgagtatttaacttgttttgttggaaattgttgaggaggagctactgcttagattcttttgctttgttagtgttttgctgatgatgttaagttgtttttcttttactcttttttcagcattagcagcaatccttggagcagtgccattcctggggacatactgggcagcagtacctgcagttcttgacctgtggctgacacaagggttaggatgcaaggccattttactgttgatttttcatctcttgccaacatactttgtagatactgcaatctactctgacatatcagggtaagtaagccacagaatttcttattagtgaatcatccaggcatttccgtttttttttttttaaaggaggatttttttctcctgggggtatacaaaagaactggtagtaggaattttcagtgaaatagccttttgtgttcccacaaatgaaattttcattgaaaatagtattgtttacaaggcatgatattttgggggtttttttttttttttggttgttgttgccccagagttccagagcaactttttttttttttttttttgagacaatatctctttcactcagactgctagagtgcagggtgcagtcatggctcatggcagccttgaaccttgaactcctaggctcaagcagtcctcctgccttgaacttcccaaggcactaggattacgggaatgaaccaccatgcccagccaatattttcttattacatatgtaatatttataatatatatgatgtcctgggttaaaaccaaattgtgaataattttctcttgatttagtgacatttaacctagaaaagaattatgaccagatgtacatcaaatattttaagtacagtgaacagttaatgattatttttatctcttctttggttttggagaaaatgttgttagattgtatgtctgaggatatccatgtgaaaccaaatctcagcaagttaatttctggcaagcagagctctctaaagatataattggaatggttctatgataaatacaggttaaatctaagtcagaatcaacactttagccatataatacaataaataaatgtctgtttttataggttttgacatctcttttagaaattgcattaagtatatcaagccagttctcagtcacattaaaacttgagagagaaaattaaaaagctgaacatcatagtgtggttaactagtgtgtcacagttgacatttgagcaggaataagtatgattaatacttaagtgcttttatttctttaaactttgctgtaaattttatattaaggtttacagctggaattaaagaaacactgtctttttttttttttttttttttttttgagacagagtctccctctatcacccaggctggagtgcagtggtgcaatctcgcctcactgcaaccttcgcctcccaggttcaagccattctcctgcctcagcctcctgagtagctgggattacaggcgtgcaccaccacacccggctaatttttgtatttttactagagatgggatttcaccatgttgatcaggctgatcttgaactcctgacctcaagtgatccgcctgccttggcctcccaaactgctgggattacaggcatgagccacgatgcccggcctaaaatactgtctttaaacgttgttattgggaaatgaaaggtttggcataaattgttttattttttaataggttaagcttttattcataaactcccacacgtttttattttttttaaaaaaagctttaaggctgagcatagtggctcaagcctgtaatcctaccactttgagaggccgaggtgggtggatcacttgagcccaggagctcaagaccagccggggaaacatggtgaaacccgttctccacaaaaatataaagattagtttggtgtggtggcacatgcctgtagtcccagctactcaggaggctgaggtaggaagatcacttgagtctgggaggtcaagactgcagtaagctgtgattgcggcactgcattccagcctgggtgatggagcggaataaaaagctttaagcatttttgatagttttccttgaatgtgttgtttagggaagaagtttacttagcaaacatggaatactgccctaaatcatttttttggaatgagaaagacaaacacattatgaatataatttattggtttcctgaagactggttctccacaagtcttactttgatttagctgtaatatagaacatccttccaggatatttagttatttgcccctcactgaattgttcttctcatctatgtttaaaactagaaacaaacagaatgtgacttatttcccagtccttctgatgtcagtggtcctttcttgtcattatcaatgtgctatgctactgtgttctgttttatttcattccgcttacataagtgatactgtaataagctggagggcatttgtgattctcctgtgaaatagaaatcttgggctttgtgacagatattttcctcaggaggccttttatcatcacctatgttaaaaactatattttaggaggttgccaaaagtctgacctatgagtaacagggatgctctcattgttgctgtcgtcatataaaagcataattaactgaattacatgctaaattgtgctcacttaattatccttgatggaggttaacttaacaggtgactcctaaccagtcccaagccaacattaacccatcataggcaggcacctgtaatgggtataaaatatctgttaacattgctggctttattctttcattcctggagctataaaaagaggcagatgtcatccataggaaaaacaattgttgcatctcaatattgttgcatctcaatattattgcagtcagtgttcagttgtatgcatcgaggtgatctaaagaaagctgataatatgctaaaaagcatagtgtattaaagaatgcacattgtattagaaatgtatttcagattttttccagtttttgtgtgttaaaggtcgtgctctttattccagaggtggccatccttacctgacaggcttggcagtggccggtggagcatactacctaggcctggaaggagcaatcatcggtcctattcttctctgcatacttgtggttgcttccaatatctatagtgccatgctagtgagtcccacgaattcagttcccacgccaaaccagaccccatggcctgctcagcctcagcggtgagttaaagcaga

SEQ ID NO: 307 - DNA, 325 bp, Homo sapiens; identical to SEQ ID NO: 303

SEQ ID NO: 308 - DNA, 159 bp, Homo sapiens
gtctttttttttttttttttttttttttgagacagagtctccctctatcacccaggctggagtgcagtggtgcaatctcgcctcactgcaaccttcgcctcccaggttcaagccattctcctgcctcagcctcctgagtagctgggattacaggcgtgc

SEQ ID NO: 309 - DNA, 491 bp, Homo sapiens
ctgtctctgtatttgataagtagcttcatccagacttgtcaggataaaggtatttgagtaccaatgctgtgataaaggttgcagaagacactaagtaaatacaaatcgttggcagagttttgggtttcatataccaagaaaatttaaaacctatattggggccgggagcagtggctcacgcctataatcccagcactttgggagaacaaggcaggtggatcacctgaggtcaggagttcgagcccagcctggccaacatggcgaaaccccatctctactaaaaatacaaaaatcagccaggtgtggtggcacccgcctgtgaacccagctgtttgggaggctgaggcagaagaattgcttgaacccaggaggcggaggctgcagtgagcccagattgtgccactggactctagcctgggcaacagcatataaaaaaaaaaaaaaaaaaaaagacctatattgggtgagaattgttaatgtcttgaaaagcc

SEQ ID NO: 310 - DNA, 490 bp, Homo sapiens
ctgtctctgtatttgataagtagcttcatccagacttgtcaggataaaggtatttgagtaccaatgctgtgataaaggttgcagaagacactaagtaaatacaaatcgttggcagagttttgggtttcatataccaagaaaatttaaaacctatattggggccgggagcagtggctcacgcctataatcccagcactttgggagaacaaggcaggtggatcacctgaggtcaggagttcgagcccagcctggccaacatggcgaaaccccatctctactaaaaatacaaaaatcagccaggtgtggtggcacccgcctgtgaacccagctgtttgggaggctgaggcagaagaattgcttgaacccaggaggcggaggctgcagtgagcccagattgtgccactggactctagcctgggcaacagcatataaaaaaaaaaaaaaaaaaaagacctatattgggtgagaattgttaatgtcttgaaaagcc

SEQ ID NO: 311 - DNA, 410 bp, Homo sapiens
ccttttggtatttttgataccactttattctgggttcttgttgcagagtcatatggctcctttaagacgttctctagtgaaagccattggtccggatgacaaagcaggttttacaattggggagccactctgcccctggatccatgtcccagaacactactaaatgactaaatcactagattacagggcttcactttgctcctaacagtatacctcttgggatgctttagaaaagcttggtgtttctttttgcatgtacaaggtcacgtttgccgctaacgtcttctttttcaactacagcttttcttctgtagtgaccatatgagggtgctttccctgcacccctctgcaccaccccatagagtccaggtttttatgattttgtgctgccttgagattacttacgggtt

SEQ ID NO: 312 - DNA, 490 bp, Homo sapiens; identical to SEQ ID NO: 310

SEQ ID NO: 313 - DNA, 6945 bp, Homo sapiens
ggatctctcagatcaattgggttattcatgtggttgattccccaattattaatgccttcgtgcttccagtaagtaaatgttctcaaacgcattgtaattgttaaatttattgtccttattttttatgatgttctaattgcttacattattttctttgtggtgcagaatggacaaatgtttgttttcactggatttttaaatagtgtaaccgatattcatcaactttctttccttctgggccatgaaatagcacatgcagtacttgggcatgctgtaagtacctaaaatgaatgttcaggtttggaaaaactgctttgaagttaacaagttaaatcttttaaagaactgatttttttcaggttttttaaaaatgatagacttttagttttgggtaattgccttaatctgctacctgaaaaaaacgtgattggctaattttgagaatttttatggtctttagtatttgatactgaataatatttttcttaaatactatttttatcacctgtctcttttgctaaaacgtaattattctcaacccctaattatttcaaattaaattttaaactttctataattattaatatacttgtaatctagtcagaaaattaattgtagggaagtgatattactatttaagtgggtaaatcatctttcttttttattcattctcagaggatagcttggagcatctttgaaaatgtctagaatgatgtgtcatgtgtaattaatacagagtaataacaataccttgccattttacagtttactgagctttttagtatatgtggcttcccattcataattttaatacccaatgaggtatgtatttattattactattttatataagagaaaactaatgtttagaaaaacagtaacatgactaacctgacaaagtaaccgaactgggactttaacgtgggtcttctgtatgttagtccagtgtttcttcctttcactacagttacctggtttttagcagcgcttttcttatagatcatagaattcaagttgatgtatgctcctgtgaatacatgtctgttcatcttgatataagtccaggaaaaataacacatctgtttcacacattttttaaattgttattcatttaaaaatataaatggctcttttgtctacattagagaaagtattttttaaattgtaaacgcaaaggtacatagtgaagtgactgaaatgctaaatcagaaatacaagtaacattaacttcaaatggaaatgataatgattctaatccttctaagagtaatctcaaattctacctgttccttagactattaataagatgagatgggctaaattgtttttctgaaacactgaaagtaattatctccttgatttcttttgagttacaggaagattttaaaaacatttttcttgactgggtgcagtggcttatacctgtaatcccagcactttgagaggctgaggcaggagtattgcttgagcccaggagtttgagactggcctcggcaacatagactcagtctgtacagaaaaattttaaaaattagctgagcatggtggctcacacctgtagttccagctgttctggagcctgaggcaggaggattgcttgagcctgggagatcaaggctacagtgagccatgatcgcaccactgcactctagcctgggtgacagagtgagacactgtctcaaacaaaaaagtaagaaaaaaaatctttttttcttaaacaaatatacacaagaatacgtctaagcagtgttattatatgcactctaatatctttcaagtaatggcttcacaactgcaaaatcagttttggccattttagcatttgaaaggtgttactattcagtacatttgttttttaggcatctagttcagtgccttatattcagtgtattgtcatctctatcagtgcaagaacagtagtagatgaggtgtaaaaagcaaacagcagccttaaaaatagaacatagttattaatatgtttttgcagagatcttaaacattgtcagcacaatattttctcttttgggagtctcagttttgattttatctaggcgtttatgttttctttattctacaaatacaggtttttgtgtgtgtatttccagttttctaagactgtataatagcaattatattctttaataacaagggctttctcttctataacaacttccttattttgagtttcactttttcatgttaaaataatttcataattgggctgggcacagtggctcacccctgtaatcccagcactttgggaggctgaggtgggtggatcatgaggtcaggagttcaagaccagcctggccaacatggtgaaactccatctctgctaaaaatacaaaaaatagctgagcatggtggtgggtacctgtaatcacaggtactcgggaggctgaggcaggagaaacatttgaacctggaggcggaggttgcagtgagtcgagacctcgccactgcactccagcttgggcaacagggcaagactctgtctcaaaaaaaaaaagataaatccataattgtttttcaaaacacacatttgtgttttgaggcaaagtaatgaggcaaatataaggaggtaaagtatgttttgtgagggtacaatatttgttaagggacaatattctaagtcagtttttagttttcagtcatttttcatacattcaagtaatgactgctattttatcagtttcagcattacaacattaacatttactaatcacctttaatggcaaaccatgaacaatctatttcattaaacttacatattactactcaaaacaactattttatgaaaaatcttttttggtcactgatataagctaatacacaaattcatagaacctgattctttcatgataaatactagacttacaaatttacaaacttgtataaatgaataatatttcatatattaggtcttgaagatcagaatacttttctttaaaataaacttccaatctttttctcaattttctcttgttttaagtgcttcatatgttaggtagtgtttagtctttatccaaaaatattagtaaaataaaacatttacttgattttttaaaatgatgcaactatattaaaaactaaaactgaccgggtttgatttctggtccttttagtaatagctgtgcaaatctgggcaactcttaacctctctctatctcagtttcattatctataaatgtagggataattgtagctatttcacaagattattatgcctgttaatataagaaattgtaggtttatatcctctgactaatagtaagtggcttagtagatactagttaaatgaatgaataggtatataagtagataaaccaaggaagggaaaaacagacccggaaagaataagcaaaagaagaaaaagagaactctcagtcttaggtggagaaggtcaggtaattgtaacacatgatgaactagaaaatgtaagcatatactgtctcaatgtataaaatgtagtttttattattttgattattcttaggcagaaaaggctggcatggttcatttgttggatttcctaggtatgattttcctcacaatgatttgggccatttgtcctcgagatagcttggcacttttgtgccagtggatacagtctaaattgcaggaggtaagtctgagacaataacttgaattgatcatagcctctggtgaagatattttaatactactgtaaagcagcaaatccagagatgtttttacattttactatgaaatatgggtacgaatttttagtgtcttatgttttctcgtttttaggggatattcttatatatgaatatttaaattaaggaatactacatctctcaaatgatgggtatggagagttagaagggcttggcaacttttggctaataaaatttttgaaaatatatttattggttttacagagagaaaacccagccactgacccttcctttcgtagtaactgaatgactcccaaattcagctgtcccttggtatacaggacttcttgtggataccaaaatctgagtatgctcaagtccttgataaaaaatggcatggtattggccgggcgccgtggctcatgcctgtaatctcagcactttgggaggccaaggtgggtggatcacgaagtcaggagattgagaccatcctggctaacgtggtgaaaccctgtctctactaaaaatacaaaaaaattagcctggcgttgtggcgggcgcctgtagtctcagctacttgggaggctgaggcaggagaatggcgtgaacccaggaggcagagcttgctgtgagccgagattgcgccactgcactccagcctgggcgacagagtgagactacatctcaaaaaaaaataaaaataaaaataaaagcatggtgtttgcatgtaactatgcacatcctctcatatactttaaatcatctctagattacttgtaattcaatgtaaatgctatgtaaatagttattttactatatatatttttaagttgtagttttttaaattgttttttcgtagatattttctatccaaattggttgaatctaccaggtgcataatccacagatatagagagccaactgtatttgggttttaatgcggcactgttaaaacctctgaactttaatgggcacagaattggctaaagctactttgccatccttccttgcttttcactctgttaaaatatcattgctttgaaaatgctgaaaggaaagtcttactaggtgtttgttaacttttgtttttagtgcttatgtataataatcatctcaaaaatgtattgagtgcctcattttgtccaaaacactgtaatactgaaagtaggtcttgcaatctttataactactttgttaaccataatttttttgttttacatctttctttgaatatttcctcttgtcccaggaggtttggttatttaggaacaatctgttatttgtttatttaatgatttgtggagttcccatcagagtgccatctgggtgctgtttaaatctaatgtgcaaaattctatgagacaaattgtttttgagattggataactaagtctattattcagtattaacatgtcatttggcttcatttatattgaagtaaaggttcttaaagagaaaataaaagattggttattccttaggttgtaggatctcatattttgaattttgtttctgtcactgacccgccaggaaattaaaagaattaatgtggttattttcctgatctatctatagattgcttttttttataatggaatcagcacagttggtcataagaaagataacatttatctatttctttcttgaaatacttgataaattctgccacttcactgtaattcgtcaatgaaaataaagtaggaatgattctatttgaattattttttcctaaatcaaggcccctcaataattttggtgacgaggagatgtttctctctagaaagttgctcactgtgattggagagcagagaggaatgttgatagtgaagtcattagggtgtgggaattgctgaggttcatctgttgtgaggaccgaatgacacatttaaagcaggatttctcaatctcagcactactcacactttggactggataattctttgttgtgggggagttgtcctgtgcactgtaggatgtttagtagcatttctgacccccattccctagatgtcagtagctctccctcctctcagttatgacagtaataaatatttccaaacatttgtaaatgtccctggaggacaaaatcacactaggtttagaatcattaatttaaagcacttagcacagtacctggcacaaatcagggctcaataaatatgagctgttatttttgttcatttaatcccctctgcagctctgtgagcttggaactgttactagcttcattttacatatgatactactgggtttagcagggttaaacaattagctcagggttaacaataagttaacagtatttggacttgaacttaagtttctctctttttaaagccacagttttaaatccttatgttatcaatagacttgacgggggcacatgcagcctgctcatggggagtgaaggcattatatgatatacatcattgacctaaaacagactgattgaaaaggaaggaagtcatttgtaatggtcacatactgtatatcagatttattatattatttcaggccatcacagacatgtggctacctttgaaagattgcttccccaattaatagctcttttctcaaaagtcctgcctattgattcatctcctacaaagttttagtacttactgaaaattagaatttaactggaaagcattcacataaatacaagtaattaggaaaattaaagttactgtatctatgtgtgttttttattgaagtcagaagaaaatttcattttcccaactaatcaatacttagaaaagaaaaaggaaattaagataatttatcaaagaaagagcattctgctatatggttaatttttttactgaaataaattgtctagtagtgtcattggatattatatgcctacgttttcttgattttcttttaaaactcaaggtcaaaatattccttgaccatattaaaaagccttcatcaataagctttcttagtgaatcctgtactcagtaggtggagactataattggaaaaatagaagtaaattccttatactacagactgtcaagaaatttataggcatgacttatatccttatcattttttaaagtatttctaatcagggaaataaaggctgtgtttatattttatatcatggagttattttaatgttagtagacagtataggaattttatcctagatactccatgaaactgttttttaaaaatctctctgtgttactccttttttcgtgaaataaattgtcttaatggagcttttctgtcatttcttcttagtatatgtttaatagaccatacagcagaaaattggaggccgaagctgacaaaattg

SEQ ID NO: 314 - DNA, 6945 bp, Homo sapiens
ggatctctcagatcaattgggttattcatgtggttgattccccaattattaatgccttcgtgcttccagtaagtaaatgttctcaaacgcattgtaattgttaaatttattgtccttattttttatgatgttctaattgcttacattattttctttgtggtgcagaatggacaaatgtttgttttcactggatttttaaatagtgtaaccgatattcatcaactttctttccttctgggccatgaaatagcacatgcagtacttgggcatgctgtaagtacctaaaatgaatgttcaggtttggaaaaactgctttgaagttaacaagttaaatcttttaaagaactgatttttttcaggttttttaaaaatgatagacttttagttttgggtaattgccttaatctgctacctgaaaaaaacgtgattggctaattttgagaatttttatggtctttagtatttgatactgaataatatttttcttaaatactatttttatcacctgtctcttttgctaaaacgtaattattctcaacccctaattatttcaaattaaattttaaactttctataattattaatatacttgtaatctagtcagaaaattaattgtagggaagtgatattactatttaagtgggtaaatcatctttcttttttattcattctcagaggatagcttggagcatctttgaaaatgtctagaatgatgtgtcatgtgtaattaatacagagtaataacaataccttgccattttacagtttactgagctttttagtatatgtggcttcccattcataattttaatacccaatgaggtatgtatttattattactattttatataagagaaaactaatgtttagaaaaacagtaacatgactaacctgacaaagtaaccgaactgggactttaacgtgggtcttctgtatgttagtccagtgtttcttcctttcactacagttacctggtttttagcagcgcttttcttatagatcatagaattcaagttgatgtatgctcctgtgaatacatgtctgttcatcttgatataagtccaggaaaaataacacatctgtttcacacattttttaaattgttattcatttaaaaatataaatggctcttttgtctacattagagaaagtattttttaaattgtaaacgcaaaggtacatagtgaagtgactgaaatgctaaatcagaaatacaagtaacattaacttcaaatggaaatgataatgattctaatccttctaagagtaatctcaaattctacctgttccttagactattaataagatgagatgggctaaattgtttttctgaaacactgaaagtaattatctccttgatttcttttgagttacaggaagattttaaaaacatttttcttgactgggtgcagtggcttatacctgtaatcccagcactttgagaggctgaggcaggagtattgcttgagcccaggagtttgagactggcctcggcaacatagactcagtctgtacagaaaaattttaaaaattagctgagcatggtggctcacacctgtagttccagctgttctggagcctgaggcaggaggattgcttgagcctgggagatcaaggctacagtgagccatgatcgcaccactgcactctagcctgggtgacagagtgagacactgtctcaaacaaaaaagtaagaaaaaaaatctttttttcttaaacaaatatacacaagaatacgtctaagcagtgttattatatgcactctaatatctttcaagtaatggcttcacaactgcaaaatcagttttggccattttagcatttgaaaggtgttactattcagtacatttgttttttaggcatctagttcagtgccttatattcagtgtattgtcatctctatcagtgcaagaacagtagtagatgaggtgtaaaaagcaaacagcagccttaaaaatagaacatagttattaatatgtttttgcagagatcttaaacattgtcagcacaatattttctcttttgggagtctcagttttgattttatctaggcgtttatgttttctttattctacaaatacaggtttttgtgtgtgtatttccagttttctaagactgtataatagcaattatattctttaataacaagggctttctcttctataacaacttccttattttgagtttcactttttcatgttaaaataatttcataattgggctgggcacagtggctcacccctgtaatcccagcactttgggaggctgaggtgggtggatcatgaggtcaggagttcaagaccagcctggccaacatggtgaaactccatctctgctaaaaatacaaaaaatagctgagcatggtggtgggtacctgtaatcacaggtactcgggaggctgaggcaggagaaacatttgaacctggaggcggaggttgcagtgagtcgagacctcgccactgcactccagcttgggcaacagggcaagactctgtctcaaaaaaaaaaagataaatccataattgtttttcaaaacacacatttgtgttttgaggcaaagtaatgaggcaaatataaggaggtaaagtatgttttgtgagggtacaatatttgttaagggacaatattctaagtcagtttttagttttcagtcatttttcatacattcaagtaatgactgctattttatcagtttcagcattacaacattaacatttactaatcacctttaatggcaaaccatgaacaatctagttcattaaacttagatattactactcaaaacaactattttatgaaaaatcttttttggtaactgatataagtaaatacaaaaattcatagaacctgattctttcatgataaatactagacttacaaatttacaaacttgtataaatgaataatatttcatatattaggtcttgaagatcagaatacttttatttaaaataaacttccagtctttttctgaattttttcttgttttaagtgcttcatatgttaggtagtgtttagtctttatccaaaaatattagtaaaataaaacatttacttgattttttaaaatgatgcaactatattaaaaactaaaactgaccgggtttgatttctggtccttttagtaatagctgtgcaaatctgggcaactcttaacctctctctatctcagtttcattatctataaatgtagggataattgtagctatttcacaagattattatgcctgttaatataagaaattgtaggtttatatcctctgactaatagtaagtggcttagtagatactagttaaatgaatgaataggtatataagtagataaaccaaggaagggaaaaacagacccggaaagaataagcaaaagaagaaaaagagaactctcagtcttaggtggagaaggtcaggtaattgtaacacatgatgaactagaaaatgtaagcatatactgtctcaatgtataaaatgtagtttttattattttgattattcttaggcagaaaaggctggcatggttcatttgttggatttcctaggtatgattttcctcacaatgatttgggccatttgtcctcgagatagcttggcacttttgtgccagtggatacagtctaaattgcaggaggtaagtctgagacaataacttgaattgatcatagcctctggtgaagatattttaatactactgtaaagcagcaaatccagagatgtttttacattttactatgaaatatgggtacgaatttttagtgtcttatgttttctcgtttttaggggatattcttatatatgaatatttaaattaaggaatactacatctctcaaatgatgggtatggagagttagaagggcttggcaacttttggctaataaaatttttgaaaatatatttattggttttacagagagaaaacccagccactgacccttcctttcgtagtaactgaatgactcccaaattcagctgtcccttggtatacaggacttcttgtggataccaaaatctgagtatgctcaagtccttgataaaaaatggcatggtattggccgggcgccgtggctcatgcctgtaatctcagcactttgggaggccaaggtgggtggatcacgaagtcaggagattgagaccatcctggctaacgtggtgaaaccctgtctctactaaaaatacaaaaaaattagcctggcgttgtggcgggcgcctgtagtctcagctacttgggaggctgaggcaggagaatggcgtgaacccaggaggcagagcttgctgtgagccgagattgcgccactgcactccagcctgggcgacagagtgagactacatctcaaaaaaaaataaaaataaaaataaaagcatggtgtttgcatgtaactatgcacatcctctcatatactttaaatcatctctagattacttgtaattcaatgtaaatgctatgtaaatagttattttactatatatatttttaagttgtagttttttaaattgttttttcgtagatattttctatccaaattggttgaatctaccaggtgcataatccacagatatagagagccaactgtatttgggttttaatgcggcactgttaaaacctctgaactttaatgggcacagaattggctaaagctactttgccatccttccttgcttttcactctgttaaaatatcattgctttgaaaatgctgaaaggaaagtcttactaggtgtttgttaacttttgtttttagtgcttatgtataataatcatctcaaaaatgtattgagtgcctcattttgtccaaaacactgtaatactgaaagtaggtcttgcaatctttataactactttgttaaccataatttttttgttttacatctttctttgaatatttcctcttgtcccaggaggtttggttatttaggaacaatctgttatttgtttatttaatgatttgtggagttcccatcagagtgccatctgggtgctgtttaaatctaatgtgcaaaattctatgagacaaattgtttttgagattggataactaagtctattattcagtattaacatgtcatttggcttcatttatattgaagtaaaggttcttaaagagaaaataaaagattggttattccttaggttgtaggatctcatattttgaattttgtttctgtcactgacccgccaggaaattaaaagaattaatgtggttattttcctgatctatctatagattgcttttttttataatggaatcagcacagttggtcataagaaagataacatttatctatttctttcttgaaatacttgataaattctgccacttcactgtaattcgtcaatgaaaataaagtaggaatgattctatttgaattattttttcctaaatcaaggcccctcaataattttggtgacgaggagatgtttctctctagaaagttgctcactgtgattggagagcagagaggaatgttgatagtgaagtcattagggtgtgggaattgctgaggttcatctgttgtgaggaccgaatgacacatttaaagcaggatttctcaatctcagcactactcacactttggactggataattctttgttgtgggggagttgtcctgtgcactgtaggatgtttagtagcatttctgacccccattccctagatgtcagtagctctccctcctctcagttatgacagtaataaatatttccaaacatttgtaaatgtccctggaggacaaaatcacactaggtttagaatcattaatttaaagcacttagcacagtacctggcacaaatcagggctcaataaatatgagctgttatttttgttcatttaatcccctctgcagctctgtgagcttggaactgttactagcttcattttacatatgatactactgggtttagcagggttaaacaattagctcagggttaacaataagttaacagtatttggacttgaacttaagtttctctctttttaaagccacagttttaaatccttatgttatcaatagacttgacgggggcacatgcagcctgctcatggggagtgaaggcattatatgatatacatcattgacctaaaacagactgattgaaaaggaaggaagtcatttgtaatggtcacatactgtatatcagatttattatattatttcaggccatcacagacatgtggctacctttgaaagattgcttccccaattaatagctcttttctcaaaagtcctgcctattgattcatctcctacaaagttttagtacttactgaaaattagaatttaactggaaagcattcacataaatacaagtaattaggaaaattaaagttactgtatctatgtgtgttttttattgaagtcagaagaaaatttcattttcccaactaatcaatacttagaaaagaaaaaggaaattaagataatttatcaaagaaagagcattctgctatatggttaatttttttactgaaataaattgtctagtagtgtcattggatattatatgcctacgttttcttgattttcttttaaaactcaaggtcaaaatattccttgaccatattaaaaagccttcatcaataagctttcttagtgaatcctgtactcagtaggtggagactataattggaaaaatagaagtaaattccttatactacagactgtcaagaaatttataggcatgacttatatccttatcattttttaaagtatttctaatcagggaaataaaggctgtgtttatattttatatcatggagttattttaatgttagtagacagtataggaattttatcctagatactccatgaaactgttttttaaaaatctctctgtgttactccttttttcgtgaaataaattgtcttaatggagcttttctgtcatttcttcttagtatatgtttaatagaccatacagcagaaaattggaggccgaagctgacaaaattg

SEQ ID NO: 315 - DNA, 3425 bp, Homo sapiens
ttgttggatttcctaggtatgattttcctcacaatgatttgggccatttgtcctcgagatagcttggcacttttgtgccagtggatacagtctaaattgcaggaggtaagtctgagacaataacttgaattgatcatagcctctggtgaagatattttaatactactgtaaagcagcaaatccagagatgtttttacattttactatgaaatatgggtacgaatttttagtgtcttatgttttctcgtttttaggggatattcttatatatgaatatttaaattaaggaatactacatctctcaaatgatgggtatggagagttagaagggcttggcaacttttggctaataaaatttttgaaaatatatttattggttttacagagagaaaacccagccactgacccttcctttcgtagtaactgaatgactcccaaattcagctgtcccttggtatacaggacttcttgtggataccaaaatctgagtatgctcaagtccttgataaaaaatggcatggtattggccgggcgccgtggctcatgcctgtaatctcagcactttgggaggccaaggtgggtggatcacgaagtcaggagattgagaccatcctggctaacgtggtgaaaccctgtctctactaaaaatacaaaaaaattagcctggcgttgtggcgggcgcctgtagtctcagctacttgggaggctgaggcaggagaatggcgtgaacccaggaggcagagcttgctgtgagccgagattgcgccactgcactccagcctgggcgacagagtgagactacatctcaaaaaaaaataaaaataaaaataaaagcatggtgtttgcatgtaactatgcacatcctctcatatactttaaatcatctctagattacttgtaattcaatgtaaatgctatgtaaatagttattttactatatatatttttaagttgtagttttttaaattgttttttcgtagatattttctatccaaattggttgaatctaccaggtgcataatccacagatatagagagccaactgtatttgggttttaatgcggcactgttaaaacctctgaactttaatgggcacagaattggctaaagctactttgccatccttccttgcttttcactctgttaaaatatcattgctttgaaaatgctgaaaggaaagtcttactaggtgtttgttaacttttgtttttagtgcttatgtataataatcatctcaaaaatgtattgagtgcctcattttgtccaaaacactgtaatactgaaagtaggtcttgcaatctttataactactttgttaaccataatttttttgttttacatctttctttgaatatttcctcttgtcccaggaggtttggttatttaggaacaatctgttatttgtttatttaatgatttgtggagttcccatcagagtgccatctgggtgctgtttaaatctaatgtgcaaaattctatgagacaaattgtttttgagattggataactaagtctattattcagtattaacatgtcatttggcttcatttatattgaagtaaaggttcttaaagagaaaataaaagattggttattccttaggttgtaggatctcatattttgaattttgtttctgtcactgacccgccaggaaattaaaagaattaatgtggttattttcctgatctatctatagattgcttttttttataatggaatcagcacagttggtcataagaaagataacatttatctatttctttcttgaaatacttgataaattctgccacttcactgtaattcgtcaatgaaaataaagtaggaatgattctatttgaattattttttcctaaatcaaggcccctcaataattttggtgacgaggagatgtttctctctagaaagttgctcactgtgattggagagcagagaggaatgttgatagtgaagtcattagggtgtgggaattgctgaggttcatctgttgtgaggaccgaatgacacatttaaagcaggatttctcaatctcagcactactcacactttggactggataattctttgttgtgggggagttgtcctgtgcactgtaggatgtttagtagcatttctgacccccattccctagatgtcagtagctctccctcctctcagttatgacagtaataaatatttccaaacatttgtaaatgtccctggaggacaaaatcacactaggtttagaatcattaatttaaagcacttagcacagtacctggcacaaatcagggctcaataaatatgagctgttatttttgttcatttaatcccctctgcagctctgtgagcttggaactgttactagcttcattttacatatgatactactgggtttagcagggttaaacaattagctcagggttaacaataagttaacagtatttggacttgaacttaagtttctctctttttaaagccacagttttaaatccttatgttatcaatagacttgacgggggcacatgcagcctgctcatggggagtgaaggcattatatgatatacatcattgacctaaaacagactgattgaaaaggaaggaagtcatttgtaatggtcacatactgtatatcagatttattatattatttcaggccatcacagacatgtggctacctttgaaagattgcttccccaattaatagctcttttctcaaaagtcctgcctattgattcatctcctacaaagttttagtacttactgaaaattagaatttaactggaaagcattcacataaatacaagtaattaggaaaattaaagttactgtatctatgtgtgttttttattgaagtcagaagaaaatttcattttcccaactaatcaatacttagaaaagaaaaaggaaattaagataatttatcaaagaaagagcattctgctatatggttaatttttttactgaaataaattgtctagtagtgtcattggatattatatgcctacgttttcttgattttcttttaaaactcaaggtcaaaatattccttgaccatattaaaaagccttcatcaataagctttcttagtgaatcctgtactcagtaggtggagactataattggaaaaatagaagtaaattccttatactacagactgtcaagaaatttataggcatgacttatatccttatcattttttaaagtatttctaatcagggaaataaaggctgtgtttatattttatatcatggagttattttaatgttagtagacagtataggaattttatcctagatactccatgaaactgttttttaaaaatctctctgtgttactccttttttcgtgaaataaattgtcttaatggagcttttctgtcatttcttcttagtatatgtttaatagaccatacagcagaaaattggaggccgaagctgacaaaattg

SEQ ID NO: 316 - DNA, 335 bp, Homo sapiens
cttgatctcctgacctcgtgatctgcccacctcctaaagtgctgggattacaggcatgagccaccatgcccagccgcttgttgattcttaagtgaaaaaaagcatacactttatgaaagttaaagtaatatttcagaacatttttaattttctcagtacacttgaaagagctctcatgaatataacttcagaaaaagtatcttctgtggtggctagtcttaatcagcatcttttagagacagtgataatgctcattagttctgagaattcagtaatttcctttcaatctgtgagtaaaacaccttaaaattaatgaaatgtctattttggtagtt

SEQ ID NO: 317 - DNA, 335 bp, Homo sapiens; identical to SEQ ID NO: 316

SEQ ID NO: 318 - DNA, 417 bp, Homo sapiens
aaaactaaaactgaccgggtttgatttctggtccttttagtaatagctgtgcaaatctgggcaactcttaacctctctctatctcagtttcattatctataaatgtagggataattgtagctatttcacaagattattatgcctgttaatataagaaattgtaggtttatatcctctgactaatagtaagtggcttagtagatactagttaaatgaatgaataggtatataagtagataaaccaaggaagggaaaaacagacccggaaagaataagcaaaagaagaaaaagagaactctcagtcttaggtggagaaggtcaggtaattgtaacacatgatgaactagaaaatgtaagcatatactgtctcaatgtataaaatgtagtttttattattttgattattcttaggcagaa

SEQ ID NO: 319 - DNA, 496 bp, Homo sapiens
gctccaaagtcttcatttgattgtttttttctaacttgttatttttttgagcaaacattcttgtgaactttcatatttttaatccttctttattgaggcttaaaaatatttttaaaaaatagtaaaatgtatttgctacaaaactgagcactaacttttgagaagttgttctaagctttcatttgtttctggtctgaatcatcagccacgaattctgaataaggctgatcttatattattgccacgttcaggtctctagaaataaccattataggacatgacctatcattcttatggattttattgaatgatgagctcagctgcttgtacaaatcattttatttgccttctcctttaatatatttatcagcaaattaggaagcagtatttcgttttgtgttgttactcaaaataagaggattttacatttgtaaaatatgtttttatatcttagcccattatctattaaaaacaaaaccaataaaattttgtcatt

SEQ ID NO: 320 - DNA, 182 bp, Homo sapiens
gaaacagcaagcctaattttaaaatgtaagtttaaataatgaatatgtttatatgtggaaaggtatagtgataactgcactttctgttaccaaggaccgtttgagaatatctaacaaagggaattggaagaggtcaccctgccttctagctagtcagagataattcattgatggagtgtatt

SEQ ID NO: 321 - DNA, 337 bp, Homo sapiens
caaaagaaaaaagaaaagcagttgtttatcttttggcttaagccaaaagaacctcaaatgaaagaaaacaaacagatgccattagaaaatgcactaaagatatgatgaaagcttatcagaaataataataaaaaatcaaatgtagcacatcctatgtacctggcactgttataggagctgtgtctgtattaacacgtaagtgtttgaggtaggtactgttattatccctatttgccaatgagagaaagaaggcaagagagcttaaggaagttttcctaattgcccagctagaaggcaggacaggtacaatttggtgctaggtgattaggcttcagaa

SEQ ID NO: 322 - DNA, 2371 bp, Homo sapiens
  SITE (1504): n equals a,t,g, or c
tagatcgttattttaaattttgttggatgtgataatggcattgtccttaactggtaagtgcatatcgaagtatgtttgcaatttgctttaaagttttattgccaaaagtggggaagcaagtgtgatagatgaaataagaatggcaggcaaggccacatgccgttcttccatgtttgtgcatgtttgaaatttttcagaataaaatattttaaaagaaaaaaaaagttaggcacatttaacttgtaaaagttagtgtccctcaaattctagaacattcatagacatgaaaatcaccctgcaaaacaaaatccccttcgttcaaagagagctgctcttgcagtctctgctctctcatttctttattcactctataatattcagtgtggggttactgtgctccagcgccaagtccagggggtggagaataacaagggcagagacatagtccttgccctccaagcacctgtgatggtaatacagtgccatgggagcttggtgaagggcctcagccggctgcagagttaggcttatcaaaagtggtgatctctacggtgaatcctggaggacacaatggggtggggaacagaaacagttgttccaggcaaagaagggaggaatctgtgccaaggcccaggggctggtgaacctcaggcgtgtgctgggggtgctgcctcctcccaaatgtcggggcacagggaagtcagtctcgcttatcatggtggccacttggctctacaaacccccattgcccaagtccccacaggcaaaccacacaactgctcttcttctcactcttttttttaagccaagaaagaactcactgaaacagccagtcagtcagggatgagtccaaggctttcctgacagagtgaccatgtttggcttggctgaaaatcacaaagccttggtttcccagttgcgtgattctctttgttctcaaggcttagtgcagcattacagtgggatggctaaacagagaaaaaaaaaaaaaggaggtctatttctttctcttcatacaaataaatatttgcccaagaatggaagtgcttaattcttaagaataaccaaatgctttggacttcttaacaagcaaatcatatacaaagcaattcagtgttcctactaattgagaaattgtttttagcaagaagatgttatgcagcatgtttttaaaaaacaagtttttccaacaacaacaacaacaacaaaaagaaaaaacagaaaataactgaatcactataatatccccaaaggctggctttcacaccatccaagggtcacacgtcacgctacattgaagcgtatgaaagagtgtctgcttgtgttacaaacctgatggagcagaggtggggcaggggggaaatgaaagcaaaagggacagacttgaagctgcacttttgcaatcaactaacagttaggaaggacttgacttgctggggctaaggaaaacaaatctggaggttcattttgcctgtgaaattaaaattatactttagtaaataanaggacgccatttaaccatgaacccggtgacatttcctggcttgctgcagcgtttctgcttgtctccttgttacatttgtttaaaatacaaacacagcatttccatgttgccagagaagcaaatgtgggctgactggctgattttagctgctatggtttttctgtaacctttaacaattgttgtgacaaataagattccatgtaaggtgcaactttctaactgtgcagtgtttgtgaaccacatccaccttctccaggtttggtatttggtcgactaagttgacgatgtcattacctttccttccatttaaaaaaaaaagttaatctgaatcgtgctgagagtttggtatgcacgctatactattcaagggagcattctcttctgtgtcagaataatatatttatgtgtgtgaatcattatacttgaatttgtggcaacattttgtatcaatgaatatatatgacacccaggctgactacaatggcttcaaagagtttaatttctcttaaatggactcagtatccttggaatgtgctgtttaagtgtttctgaattttctacacgccatttttacaggtccatctgtttatgatgtgatgagataaacaatcacgttgattttatgtttcttttcaaagaaaatgaatgtatatagtactaagcagatgaataaattattgaaaaaatatacttcatggatcatgcccactgataaaaatgaatttattttatttgttgaacaaactgactgttcaaattataagaatttatattgtccttattaatatgaatgccatctatttaagtgttgttcaatattgatatgtgttctctaataaaatattttaaacctctttctttaaacac

SEQ ID NO: 323 - DNA, 2753 bp, Homo sapiens
gctccttgaggtgcaactgcattacatttctactgaccagtactgtgccagattgatgaccagccaatacttgagtgtttatgatatggcagcagctgtttaaccacctaaaagtactgtagacctagcatacccacacttcctataagaaaggtatcaatgtccccactttacagaaactgaagcagacacactagagattaatttgtctggaattacagagctagtaggtagaatctgaaccccgtggcaatctgtatccaaaaagcagacttttacctctattattttgatagaggcatgggacagccaaatgcctaggcaaatagggtaaggtccctggagaacctccaacctgcccaagtcattgtgcacagggggcttggctaaacatgcccacggtgaaaaattccatcttttaacacatgtgcaataagggaaataaatcaatgtggagtggctcagactaagggcccacgtgcacattggaagaatgaggaggagtcaccaggaattcacaccttatgcaggggaggagcctggccttttcaactcgtatgtgatggcctggtattcaatttgtgaggtggaaacctgtgtttgggatccctctttttgttaagagctttcctttcacttaataaattccatcctcctcacccttcaatgtatccacatgcctaatttttcctggttgtgagacaaggacccagatttagctgaactaaggagcaagaaatcctgcatcaattttaataaattgcataactgataaaaggcaggaagaaagactcacacttaatctgaaagaaatcccacaaagttgaaataagcaccctttactcatgtttaaatcaaagtactaaaaactacaactgctcaacagcatataaacatttcttttcaacaccaatttgatttaatttaaacactgagcacctactgacatgtgaactctctgaattagtaacagggcctacaaagactgataacaacatgctcccttctttgataaagtcataaaggcagtgggtgggtttgtctggtaggggcaggggtttgggcaagagagagattagacaaacatgtgataagacagacatgtgataagaaaaaggcaatagtgttctctgcatttctcctctatttttctttcccattacttaaaagaagcaaaacattttttccccttcctcaaataagacacattcagagtgtttgtctctaggcaggcaaactttgttctttccaaaacaaattgagaagtacaggaagcaccaccagactgacactacagtgctgctctgtcaggtaccccaggatccaataaccctgaggccacagcaatcacctcatgctcttcccccttgaaaaagagaattaaagcataattctcctcaaagtctaaacttacagaggaaatggagcttaagaacaatgtattgtcttcttactgtttgggaatgtccccctttctcagtccttcagaaaggcccaaagaggtggcttagttaaagttgttcccatagaaccagtttctaaaaacaggagaaattactgaagcatatggcttaggcaacctacattggaattttccaatagaaccttccagtttctagcaagctgagtgaatgagaaaccaggaaatggggttttgtttccaaccacttcagcacaaggtttatgttaccttctagtgggtcttcatcttggttttcagctagaggtgtggtttcctgcaacaaaatattatctcatgagaaaataattttacttaaaggtttaatatcaatacatactttattgggaaaaactctagctctcaaaaaaactacctaaaataaaaataatattgacaattaatctctttaaatcaacttttgaatttgatgaaaagaatctttaggtggcatagtacaattatgaaagaagtaaactgaatcacagaagaactgtcacaaagaggaacaagcctaacgagggcccctggcccctggattttctgggacctaactagcatcctagagcctgagctaggaaaccagacaccagcgaccctggtatccaggctccttatttcttgtactacatgcctgactctacctagagttctgctcctccttccagaagacaatctgttaagtctccatgagcacgtttttctcatggccttctaatcacatcctcaaacccgtgactcagctaagaaccaggatattaggtgctcaagaaaatgcagaggctacagcaaagcaaaccaatcatatccttacataatgagagaagtaaactgcagaggtactcccaaagtaaatcttggttggttaacccagaccctgttggctctactggggcagcatacgtttttatgattcttctatgtagacctgttgggaacctgtctttttaagtatggccagctattccaaggaatcactatcaagaaagggctgatgtagctcctggcacttaattaagcttcccttgctaataagaatgagaagatactgagagccaaagatctactatcttttcttttcagtctatctgaaagtatgcctccccttcactctgaaatatactgaggtttggaaaataggttatatagttaccataaatttcaaaagacaatctgtcttttttctatttagatacggctaagaccgcaggcatggtggcatgcagccggtagtctcagctacttggaaggctggagcaggaggaccacttgaacccaggagatcaagactgca

SEQ ID NO: 324 - DNA, 2753 bp, Homo sapiens; identical to SEQ ID NO: 323

SEQ ID NO: 325 - DNA, 987 bp, Homo sapiens
aagatgccagcacaaaaattcgagaaatcttccaccatgcgggaatccacaatgtgaccatccagtttgaaaatgtggacttgaaggaacccctggagcagaaggacttactgttgctctgcaactcaccctgcatctccaagggctgtgctaagcagctgtgttgtcccccgggcacatgcctctggctcacgtcaatggctgtgctgagcacaatggtgggccctctctagacacatacggaagtgatggcctcagtagaagagacgcaagagaagtggctattgaagtgtctttggatagctgtctgagtgaccacggacaaagtcttaacaaaactcaggaggaccaatgttatgtcaacagaacgcatttttaatctggtactcacataatcagaccatatagacgaggcactttggaaccacaagcttggctcacaaaaagagctttctgggttgtaggcccagactagacttgcagcatgcatgctctgtgttcactaggggttggctgtttgggattttagttaaacgtgtctgtgaatttttatgtaactaactcctttccattcccctgggtgtctcatgctgctctttgactgtttcagcttgaacatgcattttctaaagcaaactgcactagtgtatatatcagggacattaaagtctgggactggggctcaatagctgcggatacagtgttcaaagaagttcttgtttctaaactgattagaacttctagctaatgctcaggtgagatcatagcttaaatacattgaaaaaactaaagtaccacaatagctgtatttttcccaatccccttaacgatcataaaagaggcaagttaagtatttctggcactgaagaaatatcttttttctttgattcatttttgaataaatataaaatgaataactattaaggtagaaaatattctcagaacattctagaggaggtaaaggttagtaggagggcgttggccatc

SEQ ID NO: 326 - DNA, 1545 bp, Homo sapiens
aagatgccagcacaaaaattcgagaaatcttccaccatgcgggaatccacaatgtgaccatccagtttgaaaatgtggacttgaaggaacccctggagcagaaggacttactgttgctctgcaactcaccctgcatctccaagggctgtgctaagcagctgtgttgtccccccggggcactgcctctggctcacgtcaatggctgtgctgagcacaatggtgggccctctctagacacatacggaagtgatggcctcagtagaagagacgcaagagaagtggctattgaagtgtctttggatagctgtctgagtgaccacggacaaagtcttaacaaaactcaggaggaccaatgttatgtcaacagaacgcatttttaatctggtactcacataatcagaccatatagacgaggcactttggaaccacaagcttggctcacaaaaagagctttctgggttgtaggcccagactagacttgcagcatgcatgctctgtgttcactaggggttggctgtttgggattttagttaaacgtgtctgtgaatttttatgtaactaactcctttccattcccctgggtgtctcatgctgctctttgactgtttcagcttgaacatgcattttctaaagcaaactgcactagtgtatatatcagggacattaaagtctgggactggggctcaatagctgcggatacagtgttcaaagaagttcttgtttctaaactgattagaacttctagctaatgctcaggtgagatcatagcttaaatacattgaaaaaactaaagtaccacaatagctgtatttttcccaatccccttaacgatcataaaagaggcaagttaagtatttctggcactgaagaaatatcttttttctttgattcatttttgaataaatataaaatgaataactattaaggtagaaaatattctcagaacattctagaggaggtaaaggttagtaggagggcgttggccatctctacattttgtgaggtgagagaaaactaatgtttactttctgctgtgaactgaactgcagctatagaatgtttcaaatgcttaaatatataatacatttttttccatggaagtgagggaatatttcagtttccttaagtatgacacaaatactcatatactgtcttttagagtcagtatagttggagctgttttcatttagtgctttgataatgatttacttatttttccaaatttcgtttgaattttctttcatatgattgcattgatctatgcagcatttaccagaaaagagtattcctgggatagcagaatgcataacactgagtgttaattcttgtgaaataaataagctagactgccttctctttaattagacatattttaaagtatttattatagttgtcaactagtaactcaatgaaaaagttgatgcccaagggagaaatgagaattagcttaattgctgcctttaatgtgtttttgaggaacttaaaattttctttcatgtcgctgatccatattaccaagttcaaataaaatttttataatcggat

SEQ ID NO: 327 - DNA, 183 bp, Homo sapiens
ggagtcaatatgaagtaatacctttttaagacagtttggctgactgcatttaataatgtccaatcatgctaagtgcaataattttgtattgggttgagtggcttgcatttgccacctgtggcactgtgatgcctgctgtatgctattttcacttgggtttcactctctctttaattgtcctgc

SEQ ID NO: 328 - DNA, 463 bp, Homo sapiens
ctagaaatgaaaactgttgtcaatctgtaatttatagaaaatttatgtaagaaaacttatgttgtcttttaagcaattctcctgcataataacttagtttagagtaagaaatatgcatcttatctaaactgatttatagaccacatgctatttttacaaatatttaagaaaattcctagataaactttggaaccaaaaacaatgtagcctaataacaatgtcaactatacttacagtataattttatatataaccttttatctttataataataaatactatcacagccatttagagaaggcaattttagtttacctctattgcttaaaggctttagctattatttatgcacaacaagaattctgactttttaaaattagttttaaaattttggatcagctttataaagaaacacattgttgttaagtgcagacaaatgagaaccttgccatttctgcattta

SEQ ID NO: 329 - DNA, 463 bp, Homo sapiens; identical to SEQ ID NO: 328

SEQ ID NO: 330 - DNA, 371 bp, Homo sapiens
cacaatctccctctaacaaaagagatggaaagggtggaatcaccaaacagagtgcacttttcggcatagtagctttcatgaagacaaaaataggatcccatttgttcattcacaatggatattcagactccacattctgccacccccatgttttattggagcctgcaattctgccaggagaagggttgcctcatgctaattcatcctaatgtttctcctccttcctacataggggaagtcttccaacccttcctactttttaagattagaagaaaagattcctcttaagccaaccatctctttggttacctttctgtaatgcctttatactgatgaaatgctgttatgttttacctaagttcggatattgt

SEQ ID NO: 331 - DNA, 371 bp, Homo sapiens; identical to SEQ ID NO: 330

SEQ ID NO: 332 - DNA, 1062 bp, Homo sapiens
atccctcgtatacactattcttctgtgcagttgacacttgaacaatgtgggtttgaactttgagagtcaatttatatgcagatacttttaaataaatatattgcaaaatattttagagatttgcagcaatttgaaaaaactcatagatgaaccatgtagcctagaaatatttttaaaaatttagaaaatgttaggtatgtcataaatgcataaaatatatgtacatcttagttttatcatttgctaccataaaatatacacaaatctatttaaaaagttaaaatatcagaactttacccacacagagacgtgacatggcactatttacagtagagagaaatataaacaaacataaagatgcagtattaactcataactacataaaattaactttagtacatgctgtgataggtttttagccacctcctgtttttactgtgttgaactcaaatgttgcgaatgtctgcttaaaactcagtgtgatgctgacatctccatgtgagtagttgacctctccactaaataccatattgcaataagaaatgatctctcgcagtccttgcataatttttaatgttgtttagtgcaatctcgcaaacttcgaatgataccatagaacagaaatttaggaatcaataagtacagtactgtaaatgtattttctcttgctcataataacttctctagcttactttactgtaagaatacagtatataatagacatacaaaatatttgttaattgactttatgtcattgttaagacttccggtcaacagtaggctattaccagttaattttatggggagtcaaaaattacattcagcttttcgactgggcgggctgtcctcagtcccaacccctgaattgttccagggtcagttgtacatagctcttcatgtttttaaaaaacacatttttggctgggcatggtggttcaagcctgtaatcccagcactttgggaggctgaggtgggcaaatagctggagctcaggagttctcaggagttcaagagcagtctgggcaacatggccaagatcttgtctctatttaaaaaaaaaaa

SEQ ID NO: 333 - DNA, 1062 bp, Homo sapiens; identical to SEQ ID NO: 332

SEQ ID NO: 334 - DNA, 599 bp, Homo sapiens
aagaaaagttacctggcagcataagatagctatgaagaatctttcccccaccagaaagaagtttagcaaactattttactgaataaatctaagacttcctccttcccagtagttgcccacaattttcctccaatatgagattatgtctctattttgtaattctgctcagaaaacctgtcttaaaatctacacatattaaactataatatgtcataaattttaagaatgttatttaacagaggtaaatttatcatgaataccatatatttaaggtagcaaaacataaagagagtaataacctcttttgatactcaacagcagaccaggtaaagtccaaacagttctgtctcatcaaaataatgaaggttgcttgtctttgacctcttttcctgttacctctttaagagataacacacatatacatacgcttttgtagatgagaccattctaaaatttataaattgtgttgtatatctttgtctgcctgattaaaatggcttgtcttaaggtaacactgaactgcttagtctttcaataggaatttatttagcaactactttgtggtattgttttgatatactctatttttgtgtttcggc

SEQ ID NO: 335 - DNA, 115 bp, Homo sapiens
cttgaacccaggagttggaggttacagtgagccaaagttgtgccactgcactccagcctggacaacagagtaacactccgcctcaaaaaaaaaaaaaaaaaaatcaggccgagtg

SEQ ID NO: 336 - DNA, 599 bp, Homo sapiens; identical to SEQ ID NO: 334

SEQ ID NO: 337 - DNA, 115 bp, Homo sapiens; identical to SEQ ID NO: 335

SEQ ID NO: 338 - DNA, 32190 bp, Homo sapiens
acgtctccgccggagcatccgggccgggcggcctccggggctgccagagcagcagggtgaggggctcggaggccgcggcgcctcggggctcgggctcccgctcccgctcccgctcccgcagtgcatgggcgggggaggctcgaggggcggcggcggggcctgggcgcgtccctgcagcgtggcgggacggccccgttccagtcacccccgcctcgctgcggtggcctcgggcctgggcgcccgccttcagctgcggcggagctggctctgtaaatgccggtgcccgcgagccctcctgaatgcttgtctgcgcccgacgagcgcggcctgtcccgaagctgtccactgccaccactcgggcagtgcttgctttagcctggccctttgcagctgaaaggcgtgacatggtgtcgggtggttcgtgggaagtcggggtttcaggagtccgtgtacttccttgtttgtctttgtcgctggccgacttgtcttcattccaggtggccagagcgagtggggccgggcgttgtcacgggtatgaacccgacgaatgtcagtcgtgtggcgggtcctgggtattgtgggtctgggtcactgcccccgcggagcccacctaggacagggacacccagggtcgccagcgagagggtaccgggcggtggttgggtggggtccgctactctaagtgggagcctggggggcgggcgacttccgtgctaaggcctctatgacgagaagcaagccaggcaaaattgtgagaaaagcgcgcctcaggcagaaagtttgaagaccctgagggcggaggatgtggccacagtgtaatggcaaagggggaaagcgatggcggtaaggatgttggtgtaggcaggtgctggattcttaagaggttggagtttattgtcactgggccagtgtaagccatttacagatgactcatggattttttttttttttttaagagactgggtgtgttgctgtattgcccaggctggtgtggaactcctggcctcaagcgatcctcccaccccagcctcccaaagtgctggtgttacaggtgtgagcagccacacccgtcgtcgtggattattttgaactgtcttttaaacgacatcaacatagcgctttataaccctttaatatcttttcaggcagtataccttaaatggcaagaaggaaataaatcatctgacatcactcagattgaagaggagctttttttcccccgattgccttaagaagtagcatactttcccaagtgagaatgccttcagttggcttttagcgattttgacaagcaacaactaaagggaaaatcgtgataattactgtcattttattgaggacacgggacagactctgtgccttgttatatttaatcctggcaaaattttgcgttcattttctcattgttttactggtgaggaaacaggctaaatgtgattaagaaatctttagcccaggctctcacaggtaagtggtggagggtcgggagctgaggccggagtcctgacttccaagcctgcccttcacgtctctgcagtgacatgaggcttgcttgcttttggttttcactttgtgtatagatctgtgtttacttttggatactagtgtggcctccaccaggtactcttttcctgaggaaatcgtgtttggtttttggctgtgctctgttgtttctaatacccgataggaacaggtgaaacgaggtggtgtagatggagccgtgaatgtttgtatacagaattcaggtgtgggggaagcagaaagtcctgtaggtgcctgaggtggtggtttctcagtatgaagtcccttgatgttacccagctgtgaacctagggttgtgtgtacctttcgcagttctaagtgacagctttgtcctgtctcttctctctagagacgcaggagtgcgagtgatcataagtgagactgattagactggcctctttatttaaaatagagccatgtttgtagtaccagctttctgtgatgcactggcagttgctcctcctcctcgctgcccggagatcgctttttgtcagtagtctgaggtaatgaggccctgacgactgagtcattccaaattttaactaaaaatcaagcaagactgggaatcgaccgagactgccagcttattgccctacagggagaagtatcactgtcaccaaactccaggcagttagtgaattctctctctggtccggcttcaggaggagctgcctgtaaagaggggccgtctttgtgacttacagtcaccgtcatggggtctctgttctggagaggtgggctgcttggacaccagcaggggaattaagtgagcagaatctgtgattgcactggactcagctcggtgcggttggctgtcaccatgttggcgtgccctctcggtggaacctgagcgtctttggctgtgttccttcttggtcagtgtaaggcccaggcgtcgtcactgtgggcctctgcagcagttctcctctgcagcagttctcctctgcatgttccacctgtaatggctgagtccagtcctgctggtcatcccatccttccttctgttcaggtggtggtgcctgtctgggccgtggccgtgatgctgctcttccagtttcttttttttttttttttttggagaatgagaaaataactttatttcattgtggggagcgggctgatgtccagcctcagaacttctggaactgcttcttggtgctggcagccttggtgacctggagcacgttgaggtgcactgtcttgctcagaggccggcaaggccggcactcgcccactgtgacgatgtcaccgatctggacgtccctgaagcaggggaacaggtgtacagacatgttcttgtggtgcttctcgaagtggttgtacttgcggatgtagtgcaggtagtctcggcggatgacagtggtcctctgcgtcttcatcttggtcaccacgccagagaggatccgccctcgaatggagacatcaccagtgaaggggcatttcttgtcaatgtaggtgccctcagtagcctctttgggtgtcttgaagcccagaccaatgttcttgtagtaccgcaggagcttctccttgccagtttctcccagcaggaccctcttcttgttttgaaagatggtcggctgcttttggtaggcacgctcagtctgaatgtccgccatcttcccggccactgaaaaaaggtgctcttccagtttctaactccctggactccctcattggaactgaagctcacagatgtttcagctggactagtttagactttgctgtattttaaaaggcagtgttgatgctccaggattcaaatacttaatcattttgttttggaaccattagctttgtagcagaggaatgtactcagcagaatcagcagaactgaagatttaattcggcaaattaaacctgtgttggcactttaggagttgggagtgttcaaggtggtgggaggcagacggggaatgagtctctgtcttcaaggatctcgccatgtaatgggcacacacgcaatggcagacatgacgtgctgtggtggaggccacgtgaggtacagtgatggcagagggggtagacgagacactttacctgcggggccaggagggtctgcacgcgcaggcacacaccgtcggttcctttacctgaggggccaggagggtctgcacgcgtaggcacacacggtcggttccatataatcaccccacccccgcaaggcagaagcaaagacatcacaaagcaaaacgcaagttttcttttgctaggaaattttcaagaggaccagatgtacagggtaccagtattcagtggcgcagtcgagtccacattccaccgcgtgtagtcctccgtgccagtttgtaattcatctgtcaaaggggcaagcctgtgataagcagccatcattttgctgatgctcctccccttgttttgtgggtgtcttctccattcccaggtgggcgtggccggctgacccccagttctcttggagtgtgtctgggattgtagctgaggggcaggcttggtggagatcgcagtgtttttcctggaaagtgattttcagagggttctgtgctgtgtgtaaggacaggtgtgtagttcagatccctgcctaggctctaaggcccatttatcacccacccacccggaaaatccagggatgagagatgttactagatgatcatagacgcaaacatgagattgagaattcgttgcacacaggattagcttttgaccagccttggtaacttccttcacttctgtgcttcagacattgctttaatctttaaatatttttatgtgccaggcaccctgagtcaagacatctaggatcctttgtttacagtagtttcttgattagctatgcgagatttatagttactaatgttaggacacatttctattcacagtgctttctggttacaaacccttaatgctagttttacactaatagcatacgtaaccttttaatattctgaacaacactgttatgaactcataactgtctctggcctgtaggatgcaaggtggcagagaggaatggtggattattatagttatgagcagatactcacaggtctgcacgcccttcagtgagtcattgactgtgtcagtggactgggttacacccaccacccataggtttcctcttttacgggtgaccagtctagatggcaggtagagtaaaaacccctagaaagacaggcacgtcctgctgcggggtcagtgacacacatgctctcgaggaccagccacgtgggcttctcttttttttgttgttttttgttttttgagatggagttttgtgcttgtctcccaggctggagtgcagtggcacaattttggctcacgcaacctctgtctcccaggttcaagcgatgttcctgccttagcctcctgagtagctgggattacaggcacgcgctgccatgcctggctaatttttgtatttttagtagagacgaggtttcaccttgttggccaggctggtcttgaaattctgacctcaagtgatccacccaccttgaccccccaaagttatgggattacaggcatgagccatcacacgcagcccttttttttttttagacggagtttccactcttgttgcccaggctggagtgcaatggcgtggtcttggttcagtgcaacctccgcctcccaggttcaagtgattctcctgcctcaggctcccaagtagctgggattacaggcgcctgccaccacgcctggctagttttttgtatttttagtagagatggggtttcaccatgttggccaggctggtctcaaactcctgaccgcaggtgatccgcccgccttggcctcccaaagtgctgggattacaagcatgagccaccgcacccggccccatgtgggcttcttgtctataccttctgtgtgggatttgtaagctagaggcgaaggttgtgtaatgtttctcatgaaaaatgttaaacacagaacataatgtaggttaatatgaaactgattttaaaggaataaatgccaacatttctgcagaatgaatggaagctcatgctagtgtcttacctgttgataaggaaatgagttaataatatcaccagcacatttcagggtggataatcacttgccaaatgttgggcaaagttttgctcccctgaatgtagcccggcagggcaggctgagagagctaacccagctagaggtaaagacgggaacgggccctgccgtgagatgccctttctgtgcccccactccaaggcagctgcctttctggtgtccttgtacaccctgtatagagttaccacatcccatggcacctgctttttaaagttttgtttctctggatctgagttgtccaacctgaaggggtggggctgccggcaggagccgtggccttgggcagagtcactcactagctgagaggggggcctgtgagtctggtattgtaatttttaaattgtttttgagatggggtctccctctgtcacccaggctgcagtgcagtggtgcgatctcagctcactgcaacctccgcctcccggtttcaagtgactctcctgcctcagcctcccgagtagctgggattacaggtgttcaccaccacacccggctattttttgtatttttagtagaggtgggggtttcaccatgttggccaggctggtcttgaactcctgacctcaggtgatctgcctgcctcggcctcccaaagtgctgggattacaggggtgagccaccgcgcctggcccaaattaattttaaataaaatttaaagctcagttgccctgtgtgacacctactccacagattcagagctgcgctgtcccagcagaatgttctttagttggcaccgatacagacattaagctccttcaggaaagggcccagtgtggctgggtcagcatcttagcctcaaaacctaggatgttgtgggtgctccaggattatttgctgaatgaaaaagtttgtatttgtttcttgtacgtatgcaaattgggaaccaaatgctaattttgtaattgatacttgaaatctgacaagtttcataatacattttgtctctctctcctgtcaggtatcatgatattagctggtttgacatcaagtcatttgtgagtcatcagatcttctcctgaaaatgggagacacagtagggcccctcccaggagctcttggctgttgctgatggcagaagccaagcttgtccaaggttcacttgtagcccctcagcgtcagctcagctggtgtcgtcctgaccatggacggcgcgtcggccgagcaagatggcctccaggaggacagatcccacagtggcccctcgtctctccccgaggccccactgaagcccccgggcccactggtgccacctgaccagcaggacaaagtccagtgtaagtcgtgaggttcctctgtgtgctggtcacaggaggacctggtgttgagggaggacgtggtgttgagggaggatgtggcgttgagaccactgtgagcttttcacttaattcaaagttgtttttttttttttttttttttgagacggagtctcgctctttcgcccaggctggactgcagtggcgtgatctcggctcgctgcaagctccgcctcccgggttcatgccattctcttgccccagcctcctgagtagctgggattacaggcgcccgccaccgcgcccggctaattttttgtatttttagtagagacggggtttcaccgtgttagccaagatggtctcgatctcctgacttcgtgatccgcccgcctcagcctcagcctcaaagtgctgggattacaggtgtgagccactgtgcccggcccaaagtatgttttagtaactgaatgatgccacctttagatcaggcacattcctgctaaacagaactccattaaacgtgtggggcagcagcagtgtttccctgaagggatctatgggtctttatcatgttccctgcctaaaattctaccttttttttttttcgacgtggagttttgctctgggtgcccgggctggagtgcaatggcgagatctcgtttcactgcaacctccacttcccgggttcaagcaattcttctgcctcagcctcccgagtagctgggattacaggcatgcgctaccacgcccagctattttttgtatttttagtagagatgaggtttctccatgttggtcaggctggccacgaactcccaacctcaggtgatccgcccaccttggcatcccaaagtgctgagattacaggcgtgagccactgcgcccagccattttttttttttttttttttttttgagacggtgtcctgttctgtcgcccaggctggagtgcagtggcaccatctcagctcactgcaacctctgcctcctgggttcaagcgattctcctgcttcagcctcccgagtagctgggactacaggcacctgccaccacacccagctattttttgtatttttagtagagacggggtttcaccatgttggccaggctggtctcgaactcctgatctcaaatgatccacccacctcagccccaaaaagtgctgggattacaggagtgagccactgtgcctggccgaattctgcctttttgattggtcagttgctgaatttgtaatagctagaattcagaagtcgtcccgtagagatctaaggattacggagcacagtgttatgttagccccctgggttattcacgtgtcagagggaaagggtgacttagttattcactcagttctcatgcctcttcctggccaggaggttcagtgctttaaaactgtagactacagatgtgctaatttactagcagaagtcacagtctaattcctgtaaaatgatactcaggcgcttaggatggctttgctggtccttgctacataagcatcaggtgaggcagataacaacttagaggcccaagatcaagagttctgagacccgcggccgtggaacctgctcttagatctgctgctcaggagcaatgtgccctcgagcaagacgctgggttaatctcagcctccgcccctttttctattttaaacattttattactgtttttagagtcagggtgttgctccattgagcaggctgaagtgcagtggtgtaatcatagctcacggcagccatgaactcctgggcttaagtgatcctcctgccttggtctctggggtagcggtgactatcgatgcgtgtcagcacgcctagctgatttttttttttttgagacggagttttgctgttgttgtccaggctgtagtgcaatggtgcgatctcggctcatggcaacctccgcctcccgggttcaagcgatcttctgcctcagcctcctgagtagctgggattacaggcatgtgccaccacgcccagctaattttgtatttttagtagagatggagtttccatgttgatcaggctggttttgaactcccaatctctggtgatccccccaccttggcctcccaaagtgctgggattgcaggcgtgagccaccgcgccctgttgcctggctcattttaaaaactttttgtataaacagtcttgctgttgcccgggctggtcttgaattcctggccttgagttatccttccacctcggcctcccaaagtgctgggattacaggtgtgagccactgcgcccggcctaacccagtaacttttatctgaaatgcaaggttccccctctcccagcagtggagctcacgggtcctttgcatgaaaggcgtctcagtgcgttggtcgggtgcccgtggtctggcttcctgtctggcacccctgcttttattctggtttttctttcgggaggcatgacagtaagtatctgctgttagtttgaactcacatttgcaagtgaaagaaaccttttctttttttgagacggagtctcgctctgttgcccagactggagtgcagtggcacgacctcagcttactgcaagctccacttcgagggttcacgccattcttctgcctcagcctcccaagtagctgggactataggcgcccgccaccacgcccagctaagtctttgtatttttagtagagacggggtttcgccgtgttagccaggatagtctcgatctcctgacctcgtgatccacctgcctcagcttcccaaagtgctgggattacaggcgtgagccaccgcgcccggctaagaaactcatttttaatttgcttgagcaaaaagcaaatttgctgtcctgcatgcacgtgggatccgaggaatgctgacccctgtgagacacggaggtgttgccgggcctccagagccaccggaaccaggaccagaaccccctgaggaccctccctcccccctcacatgtcttggttctttgactgtgaactggcccacccaccagtcagcagttagggggcagggaaaagactgaaaatcacttcattgaaagaaatctttctttgttccatttgatgaggaaatatgttttagtttgtgttgtgggtaatttgtatataatcattttagtgggtgaactgaggtaacacgtgggtatagaattgtcactggtccaacccaggcctttacccagcaggctgtcatcaagcagaagcgcggttctgggctgtctctgcttcacgggtggtgtgatgacatcatccacctcttcgccttagggtcctcgccttggaggataagctgaggctttgaaatgactccaaaatcagcctttgtaaatgtgaggctgtgactctgattaacactgctgttaccagtgcctgctagaaagattgtcagctgtgttttaagtgtttgtggttttcgcttgttttaaactggcgactttcataagatttcttattggttttacttaaatggaaaggaaacattggctgggtgcggtggctcacgcctgtaatcccagcactgtgggaggccgaggctggtgaatggggaggagtttgagaccagactggccaacatggtgaaaccccatctctactaaaaagaccaaaaattagccaggtgtggtggtgggcacctgtaatcccagctactggggaggctgaagcaggagaatcgcttgaatctggtgagtggagcttgcagtgagctgagcttgtgtgactgaactccagcctgggcagcagaatgagactccgtctcaaaaaagagaagaggaaatgttactgtcgttactacataaattctacagccaagagtgtggaggtgtggagggtgagttcaccttatagtgtagaggtgtggagggcgagttcaccttagagcatggaggagtggagggtgggttcaccttagagcatggaggagtggagggggggttcaccttagagcgtggaggtgtggagggcgggttcacgttagagcgtacaggtgtggagggtgggttcaccttagagcgtggaggagtggagggtgagttcaccttagagtgtggaggtgtgggggggggttcaccttagagcgtggaggagtggagggtgagttcaccttagagtgtggaggtgtggggggggggttcaccttagagcgtggaggtgtggagggtgagttcaccttagagcgtggaggagtggagggcgggttcacgttagagtgtggaggtgtggagtgcgggttcaccttagagcgtggaggagtggagggcgggttcaccttagagcgtggaggtgtggagggtgggttcaccttagagcgtggaggtgtggagggcgggttcaccttagagcgtggaggagtggagggtgagttcaccttagagtgtggaggtgtggggggggggttcaccttagagcgtggaggtgtggagggtgagttcaccttagagcgtggaggagtggagggcgggttcacgttagagtgtggaggtgtggagggtgggttcaccttagagcgtggaggtgtggagtgcgggttcaccttagagcgtggaggagtggagggcgggttcaccttagagcgtggaggtgtggagggcgggttcaccttagagcgtggaggagtggagggcgggttcacgttagagtgtggaggtgtggagggcgggttcaccttagagtgtggaggtgtggagggcgggttcaccttagagcgtggaggtgtggagggcgggttcaccttagagcgtggaggagtggagggcgggttcacgttagagtgtggaggtgtggagggggggttcaccttagagcgtggaggtgtggagggcgggttcaccttagagtgtggaggtgtggagggcgggttcaccttagagcgtggaggagtggagggcgggttcacattagagtgtggaggtgtggagggtgagttcacgttagagcgtagaggtgtggagggcgggttcacgttagagtgtggaggtgtggagggcaggttcaccttacaggaaggacgtggacaccagaggggctgtgggccttatcctggccaccccgcctgtgggacggggcccatgggctgctcctctcagagtgaagcctttgtgggatgagaaagtgccgtgctcatgagtctggatcctcttctctcctactccagctgcatgtctgaaaagcgacgtcaccttgttgttaaagccatggtggtccagcgtgctctgtctttccaggtgccgaggtaaacagagcatccacggaaggggaaagcccggatggacctggccagggaggcctctgtcagaacgggccaacgccacccttcccagaccctccgtcgtctctcgatcccaccacaagcccagtgggccctgatgcctctccaggtgtggctggtttccatgacaacctaaggaagtctcagggaactagtgctgagggcagtgttagaaaagaagctttgcagtctctcagactcagtcttcctatgcaagaaacgcaactgtgtaagcatccgttaccccgcttttcccaccctccacgtccgcgtcgctcagccccttgggagcaggtgccctgcgcactcactgtctgagctgttgtgtgcctgtgcctgccgtgtgccatctgagtcccacgtggggctgtgagtttagcaaggagagcttcaagttagagagtgaagatgcaggtggagtcaaggttctgctgtggtctgactggcagcagtgctgacgcttttgcgttaaaggccagcctgcatgtcctgtgtcacccaggtgcttggtaagcagacggtgggcatccagtctgttgttttggttttttttggtttgctttttttttctgagacagagtctcgctctttcgcccaggccggactgcagtggcgctgtctcggctcactgcaatctccgcctcctgggttcatgccattcacctgcctcggcctcccgagtagctgggactacatgcacccgccaccaggcccggctaattttttgtatttttagcaaagatggggtttcaccgtgttagtcaagatggtattgatctcctgacctcatggtctgcctgccttggcctcccaaagtgttgggattacaggcgtgagccaccaggcccagcctgttttgttttttaattagagtcaggatcttgctctgtcgcccaggctggaggccagtggcagagtcagagctcactgcagcctctgcctcccaggttcaagggatcttcctgcctctgctgtcaagtagcttggaccacaggtgcgtgtcaccacacctggctaattttaattttttgtgtgtgtagaaacggggtctcaccatgtttcccaggctggtcttgaactcctgggctcaagtgatcgtcataccttggcctcccaaaatactgggattataggcgtgagccactgtacctggcctgcagtatatttttaaaaatttcttaaaactaaataacaacaacaaaaaaccctaaattactgaaatcagactgcatttcacatgtgtttatttgaaacaattctgaaaactcactgccagcatttaagttgagaagtagcatgtaaaaaagtctagattcctgatttttttcaacttagtttatttactttggggtcctgaagttacagatgtgtgagctctggcccaggtgtctggggcagcagcgctgggtctacgtgcacacctttgcgggatgcccctggtcacctgttcctgctggcgcctggccctgagcctatctcctgcgtcagtgtttggttgaaaccctgcttattttgccgacttatataaatatctgcctggtggccataggcctgaatttgccacttacggtctagccatctggaccactttgccatgtgaaaaggactagagatcttttcagtgataaaatgtataaactaataatggtacatttacagtgaaattcttggtgactgctcagatgttagggattatttaggacagtagctgctcatctcctcagcatctacctgtaaggagggtgtcatgtgtaaagcgttgctgtgtgattatgctttcctactctggtcggcacccaggccgtcgggcggtgtctgctgatggcttaggaaggatgaggccacacactcagtcctgggaagtggagccctgggtttgtaactataacacgttggcacgtaccatgcaactctttcatcacctacaatgaaaggtctgggttttagatattttaaattctggttttggctaaaaagttgtaaattttcccctcctgtcccggagcatgacctcggattggagtcttgtctgtctggaaactgaggtaacccgcccccagccctggagggcggagcctgtgcagcatttaccctgcagtgaggcctggcgccaggcttcagccatttgagtaccgccagagccttatcgtaatgtgacttgttactgcaggagctgagatgagctgtgcgtcagagcggaccccaaatgtaactgagcaaagaaatgcactcggggtctcgtgaccccacgacggctgagctcctgtggctgggtactgcctgtaactccacggtgccggcgtttcaggttctcccagcggggtcacgagaacctgctgtgaagccagggcaagttgcagcgtggtgagagctgagcctgcctcagagtgctcggcacggctccagctttgaacccagttctttctgttgttaaaaggcacttgctgccgggcacggtggctcaggcccataatctcagcactttgagaggccgaggtgggcggatcacctcaggtcgggagttcgagaccagcctgaccaacatggagaaaccctgtctctactaaaaataccaaagtcgtcaggggtcgtgttgcatgcctgtaatcccacctactcaggaggctgtggcaggagaatcgcttgaacccaggaggcagaggttgtggtgagccgagatcgcaccattgcactccagcctgggcaacaagaatgaaactccgtctcaaaaaaaaaaaaaaaaaaggccgggcgcggtggctcacgcctgtaatcccagcactttgggaggccgaggcgggtggatcatgaggtcaggagatcgagaccatcctgactaacatggtgaaaccccgtctctactaaaaatacaaaaaattagccaggcgtggtggcgggcgcctgtattcccagctacttgggaggctgaggcaggagaatggtgtgaacctgggaggcggaggttgctgtgagccgagatcatgccactgcactccattctgggcgacagagtgagactccatctcaaaaaaaaaaaaaaaaaaaaaggcacttgctgccatttcctgttttaccaggggaatgccccaggtggggtgtactcatcatgggatcacagacccagtgcctggccactgtgtctcctgtgaggtagatcccgcctgtggtccgtgtccggggctcacagttctctcttgatctagaaattgtccttccaaacaagatggctgtgcattgtttaggtgtaaagtatatgggtaattaagtacaaaatgaccaagttcttgtgcctgattgttctgcatcctggtattttatgagtttccaaattgcccttttcccactgcaggctctacagattctcccctgcccctggagaaggaggagcaggtccgacttcaggctcggaagtggctggaagagcagctcaaacagtacagggtgaagcgccagcaggagagggtgagtctccctctcccgaacaagctcatggaaagcttcctgtgccagagacaactgttggtcccacataacccggggacctgccattggcttctctgagctgccatgggctcaggggcaacaagcacattttatttctaaatctgccaattgaaaagcaaagaaagcaaacacgggtgacctcagaggtactgtgggttcagttctggaccaccacaaaaatgtaaacattgcaataaagcaagtcctacaatgtttttggtttcctagtgcataaagaagttatgtgtatacgctactgtagtttactaagtgtgcagtagcactgtgtctaaataaaactgatgtacccacattaatttgaaaatgctttattactaaaaaatgctaacgatcatctgagccttcagcaagtcgtaatctctttgctgttggagcatcttgcctcaagtttgatggctgctgactcatcagggtggtggttgctgaaggttgggctgtggtaatttcttaaaaccgcactaaagtttaccatatcttagaaaagatgtctctgtaacatgcggtgctatttgatggcattttacccattcaggttttatcctgagattgcagcaattcagtcacatcttcaggctccacttctagttctagtgcccttgctgtttccaccacatctgcagtcaagttctccacggaagcactgaatccctcaacgctgtccgtgagggtagaaatcagcttcttccacactcctgttaatgttgatattttgacccctccacccatgaatcatgaatgtttttaatggcatctagaatggtgaatcctttccagaaggttttcagtttactttgcccagatccatgagaggaatcactatgactatggcagttgtacccttacagaaggtatttcttaagtaataagacttgaaagtcaaaactagtccttgatccatgggctgcagaagggatgttgtgtctgcaggcaggaaagcgacattcacctccttgtacatctcccatcagagctcttaggtgatctggcgtattgtcaatgagcagttaaaaaaaatatatatatatatatatgtgtgtgtgtgtgtgtgtgtattttgagacagaatctcgctttgtcacccaagcaggtgtgtagtggtgcagtcttggcccactgcaacctccgtctccctagttcaagcaattctccagcctcagcctcccgagtaactgggattaaaagcacgtgccaccatgcccggctactttttttttttaatgtttttttttttttttttttttgagagacggagtctcactctgttgcccaggctggagcgatctcggttcactgcaacctccacctcccaggttccagtgattctctgcctcagcctcctgagtagctgggactacaggcacccaccatcgcgcccagcctatgtcatgtttcaaaaggatctcttcagtagaagaagatcaataaaatgaccagcgtgttcttcttatacctttaaggttatgtttttaaatactttaatctggctgggtgcagtggctcacacctataatcccagcactatgggagggtggggcgggcggattgcttgaggtcaggagtttgagaccagcctggccaacgtggagaaaccccgtctctactaaaaatacaaaaaattagccggatgtgatggcacacccctgtaatcctagctactcaggaggctgagacaggagaatcgcttgaacccaggcggcagaggttgcagtgagccaagattgcaccactgcactccagcctgggtccatctcaaaaaaaaaataaaaatgcaagtatgaaaaatgaagagttatcctagcagttgtaagattagtgggaagtataacatttataacaacaaaaaggataaactgagaaataagttagaatggccgcagagggcctgggttctagatgggggtggggtagctgctctgttgaggggcgtgcatgtagggtccagccccacagggtcagtgggttttctccctgtgtgcggagacgagagagtgtagaaataaagacacaagacaaagagataaaagacagctgggccggggggaccactaccaccaagacgtggagacaggtagtggccccgaatgtcaggctgtgctgttatttattggatacaaagcaaaaggggcagggtaaagagtgtgagtcatctccaatgataagtaaggtcacgtgggtcacgtgcccactggacagggggccctcccctgcctggcagctgaggtagagagagagggagagagagagacagcttatgccgttatttctgcatatcagagacttttagtactttcactaattttgctactgttatctaaaaggcagagccacgtgtacaggatggaacatgaaagcagactaggagtgtgaccactgaagcacagcatcacaggttgatggttaggcctccggataactgtgcgcgggcctgactgacgtcaggccctccacaagaggtggaggagtagagtcttctctaaactctgctaagtagtgggtgtttttccttgacactgatgctaccgctagaccatggtctgcttggcaatgggcgtcttcccagatgctggcgttaccgctagacccaggagccctctggtggccctgtctgggcataacagaaggctcgcacttgtcttctggtcacttctcactgtgtcccctcagctcctatctctgtatggcctggtttttcctaggttatgattgtagagtgaggattattataatattggaataaaaagtaattgctgcaaactaatgattaatgatattcatatataatcatatctaagatctatatctggtataactattcttattttatatactttattatactggaacagttcgcgtcctcagtctcttgcctcggcacctgggtggcttgccgcccacacgtgcaagcagatgtgggcaggcggaggaaattatggatttaaggtggttatagttcaacagaatgttcttcctttttgaagaaatttttttttgttttggagacagggtctcactctgtcacccaggctggagtgcagtggcatgatctcggcttattacgacctccacctcctgggttcaagtgattctcctgcctcatcctcccaagtagctgagattacaggtgtgtgccaccatgcctggctcatttttttgtatttttagtagagacgggggtttcaacatgttggccagcctggtcttgaactccttacctcaaatgatctgcccgcctcagcctcccaaagtgctgggattacaggtgtgaaccaccacgcccggccttgaagaaaatttctatgtttatccaaaaaaataaaataaactggagagtagccaggaaagttctgttgaggaagtctgtgggtggcaagccactcaggcaccgaggcaagagacagaggacacgggctgttccagtataataaaatataaaacaagaatagttacaccagatatagatcttagatatgattatatatgaatatcattaatcattagtttgtagcaattactttttattccaatattatgataatcctcgctctataatcatagcctaggaaaaaccaggccatacagagataggagctgaggggacatagtgaggtgtgaccagaaggcaagagtgcaagccttctgttatgcccagacagggccaccagagggctccttggtctagcggtgaagccagtgtctgggaagacgggaagacgcccgttaccaggcggatcgtggtccagcggtagcaaaaggtgtcaaggaacaacacccactacttagcagaccgggaaccggggggcgggggggcgggggtgggggttggtgtctccctttccccgggggagtttagagaagactctgctcctccacctcttgtggagggcctgactgatgtcaggcctgcccgcagttatccggaggcctaaccatctccctgtgatgctgtgcttcagtggtcacactcctagtctgccttcatgttccatcctgtatacctggctctgccttctagacagcagtagtaaattagtgaaagtactaatagtccctgatatgcagaaataatggcgtaagctgtctttgtgtctcctctccctctctgccttggttgccaggcagggaagggcccccgtccagtggacacgtgacccacgtgaccttacctatcattggaggtgactcacattctttaccctgccccttctgccttgtatccaataaataacagcgcagcccgacattcagggccactaccggtctccgcgcattggtggtagtggtcccccaggcccagctgccttttctcttgtctctttgtcttgtgtctttatttctacactctcgtcgccgcacacagggggagacccactgaccctgtggggctggtccctacagaagtctgatgaggaggtacttgctgggatgtgttttaaacgtgttgaggtcacagtcactgaagagtgtgctttagaccagaggtggtcatgctggtcactagagtggggccttgcggcagtgagaccaccacggatcggaggcctggccgcaccctgtgtggtgaggggctggggaggtggtgctctctggttgtcagcggagggagtagtgatcggtgccacctttctgaatggcagttttaagtatgctgcttgtggattttaaatgtaatttttgtacttttgttttcttctcagtccagtcaacctgcaaccaaaacgagactttttagcacgcttgatcctgagctcatgttaaacccagaaaacttaccaagggccagtaccctggctatgacaaaagaatattccttcctgcgcaccagtgtccctcgggggcctaaggtgggcagcctggggcttccggcacatcctagggagaaaaaaacttccaaatcaagcaaaatccggtctctggccgattacagaactgaagattcaaatgcggggaattctgggggaaatgtcccggctcccgattctaccaagggttccctgaagcagaacagaagcagtgcggcgtccgttgtgtctgagatcagcctgtcccccgacactgacgaccgtctggagaacacctccctggctggagacagcgtgtctgaggtggatggaaatgacagcgacagctcatcgtacagcagcgcctccacccgagggacctatggcattctgtcgaagacagtgggcacgcaggacaccccctatatggtcaacggccaggagattcctgcggataccctgggccagttcccctccattaaggacgtcctccaggccgcagccgctgagcaccaagaccaggggcaggaggtcaacggggaggtgcggagtcggagagacagcatctgcagcaggtggtggggacagcagaggtgggcggggtgggtggaggtgggtggggccaacagaggggggtgtggggcgggcagaggtgggtggggcggtagcagaggtgggtggggccaacagagggggcggggtgggcagagacgggcagggcaggcagagggcctggcctgagatgttgcttcccgggcccacggctctccgcactggaacaggtgatacacagcttttcttcctgattctatccttagtcttgacatgaacatttaattcataacaagtctgctgctttttaatcagtagaattagatcagcaatggtctgtgttactaaaatatccagtctcccgtttacatagacttgtcactaagctgcacgacgcttgcatgtctcatgtttctgtaacagttcccactgcgtgaggtgccaactgttggcaggaatgttcatccgtgcatcatgcaagcctcagctctctacttaaatctcttacttaattttaaaaaattgggagagagcagcaggggtgtgtggaatttggagaatgtggaggagtgtgaaagaaaatgaggatggctcgcacaggcctgacccgtgcctttgtccccagcgtgtccttggagagctctgcagcagaaacacaggaggagatgctgcaggtgctcaaagagaaaatgcgactcgaaggacagctggaagccttgtcactggaggcgagtcaggtaacggacgttcgactgacatctcagcgtgcggcgaagtcggaaagcatgtgtggctcctctgttgggtacgaggtttcacagatgtggttgggaatcagccgccgcagcatgtgtggcagccgagggttctgcatctttacgttttttgtctacttgtcagccttagaaagagttgtgagttttctgcctcatcgtgcatgggcgtgtttctccctgcgtctctaccagaatatttgctagatgttaggtgtctcacagtccataagagtcaaattctcttggtgggttgcagctttttctggcatggtgaaccttttttctttgtagtgatttctgctttttctgatactaattgtgctgtatcagagaaagctgcacacgctggcttggttagcatgtgccagaaacatcattttccatcccttatttcagctctcctttgtcattttgtcgtatgcactttatccacagtgaagagctaggtatttatcttctgtcggcagttgagtaaatctgttcagtggggttcagctgtccgcttctggcgtgggagggtgagaatgcacccaggccctgaggtgacacagctgagggagcctcctgtggcctgcgaggccgcagagcagggctggagctgctcacagtgtccggagcttgccttgctaaatgcacgcctcatgtcgaagatggttttctcatacaacatggtccttggacacaaaccaaccagtttgtgacacctaaagctgtgtctacagaagaggtgatttcggctgttttgaggctaattctggttgtacggtcgtcacttctccagtgttacagcgtgagcctccctccgtcggatgcatttcccctcctctgtgtagccactctctcgaacggtggcttgctgtcactgcactttgtcttcttatcctcttaggatcactgattggtccttcggttgcatccacaccaagatcgtgagggttgtttcaggtgtggtggttgctggccccttgctctagggtctcctggagtttgtggagttcctcaattgctttgggtgtttgttgtcttggtgatgtgtgaactggatccctgcccctgtaggcctcagcgtgggggcaggtggtggggcgatttcctctggcgattctctgctgctcctgggaccacacagcactgcggtggccactcaggactgtgctgtgtcccgtggctctggctggagccgcacttaggcagccgcctttccctgcctgtgttttttgcccatttccccccagatctgaatccgcttttaatctctcaggggtccctctacacgtctggcattctgtgtgtgtgcgcatacatgtgcacccgtgtacacgtttggtgttttgaacacgtttccagtgtcctcgcaggagacgggtgcttccccagccctgccctagcgctgccctgtgcaggtgcagttgggcccaaaaccagtgcaggctccctgtgcgtcctgggcctgtttggaaagtcgcctttttctgtgacggctgtgctgggagagcgcctgggggtctcggggtcctctgtcaggccttgggagagcgcctgggggtctcggggtcccctgtcaggccttgggagagcgcctgggggtctcggggtcccctgtcaggccttgggagagcgcctgggggtctcggggtcccctgtcaggccttgggagagcgcctgggggtctcggggtcccctgtcaggccttgggagagcgcctgggggtctcggggtcccctgtcaggccttgggagagcgcctgggggtctcggggtcccctgtcaggccttgggagagcgcctgggggtctcggggtcccctgtcaggccttgggagagcgcctgggggtctcggggcagggtcctctgtcaggccttgggagagcgcctgggggtcttggggtcccctgtcaggccttgggagagcgcctgggggtcttggggtcccctgtcaggccttgggagagcgcctgggggtcttggggtcctctgtcaggccttgggagagcgcctgggggtctcggggtcccctgtcaggccctgactgactcgctggttgtgttcctgttaatacactggatggaagtgactcgttttcttaaaatcattgtggttgttgggatcttttcaggcacttaaagagaaggctgagctgcaggcccagctggccgccctcagcacgaagctgcaggcgcaggtggagtgcagccacagcagccagcagcggcaggattcgctgagctcggaggtggacaccctgaagcagtcgtgctgggacctggagcgagccatgactgacctgcagaacatgctggaggcaaaaaatgccagcctggcgtcgtccaacaacgacttgcaggtggccgaggagcagtaccagaggcttatggccaaggtagaggacatgcagaggagcatgctcagcaaggacaacacaggtgaggctggccctggccacgccctcccctccctgactggtccctgctgctccctcctccttcctcgactggcccccgccacgccctcctccttccctgactggtccttgctgctccctcctccttcctcgactggtccccgctgctccctccttcctcgactggtccccgccacgccctccttccctgactggtcctcgccacgccctcctccctggtgctgacagctctgtcggcatgtgactgtgcctgtgagggttgcattggtttatagtttacacataaggaggctgcttttctaaaggaaatacaagttttagttgaacttgtggaattgtgtacatttttgtgtgcacatccaggggaatgaattaggtcttggagattgaccttggaccctggagtatctgcggtgatcctgcctcaaaagtccagtgttatttgggagtatagagctgcccacttattccacagaattgcagattccatttaaaatattcaagaacagctccttgactgtccgtctggcaaccttttctccctggatgcagtgcgtcggtccagctgcctccctatagggctcgcccagagagtacaagtagggcagtggattgcggaagccgcggcgggcttccatgtggcttggcagcacgccttccaccccctcagtccccgcccgggccagtcccagagctcacactccagtgcccagcagacacggagaagactgtggttggcctgctcagagcaagcgtgaacaggagtgggaaggagagggcgaagcagggtgggaagattgaagacaaagcccgaggggtgtagagtgacccgggtccagagtcctcccagggaggccgcttggtgggctcatctctcaggtcttgggatctcctgagccaggggtccctggtgcagccgctgtgagggctgactccatgtgagccggtccgcctatgaggctgtgagactgggtcttggatgacacagaggaaggtgacaagctggcgtcacagaggctacattctaatactaggaaagagaaagccggccgagagacagtagtactcttgtaatcgctttaatattttagtccttgagcatttcgtgatacccaatcccttaggaaaaaccatgaaacccaaaaagttctcaacactaaagtagtttggggccctgtgggttgccacgcttcacttgaccagtgatcggggggtggcaaaaccaacctgaactttgatgaggccgcccagtcctaaccggtgggtttaagttggaattagccacacggatacccttgctgtttgttgatggctggtagacatcgttgggtcgaagacagagcctcggcgtccatgaccattttcacagatttcctaagtgtgaatttgccgacttgattaaatttgtttgaaccacaaactcagtattcatggacacgtgtggagcagcagagtacgtgagtcatcctaggcgcccgctgaggagggcaggatactctgcctgccttggtgctcagccgggctgcaggcaggagttctttccagggccatgtttacatgtttgtgctttggggggtaattttgcagttaaagatggccccaaacactgtctagtgtttttttttgttgttttgttgttgttgttgttttgttttgtttttgagacggagtttcactcttgttgcccaggctggagtgcaatggcgccatcttggctcaccgcaacctctgcctcccaggttcaagcgattctcctgcctcagcctccctagtagctggtattacaggcgtctgccaccgcgcccggctaattttgtatttttattagagacagggtttctccatgttggccaggctggtctcgaactcccaacctcaggtgatccgcccgcctcagcctcccaaagtgctgggattacaggcgtgagccactgtgcccggccaacactgtctagtgtttttaaacacagagaggatgtgaggtgtttcatggagaagatgtacttcatttttttcttttggtttatttttttcaattcatcctgtttctatttttttaaattttctttttgtttttaaaaattcatttgtctttgagatgggttgctctgttgcccacgctggagtgcagcagtgcagttgtggctcactgcagcctcaaactcctgggctcatgggatccgcccgcctcagcctcccaagtggctgggaccacagatgcatgccaccccgcctggctaattttttttttttggtggtgggggatctcgctgtgttgcccaggctggtctggatctcctgggcgtgcacccctgtgccccctgcaccccccatgccccctgcacccccgtgtccggccactgttatttcctagagaatctttgctcaggcttgttggtcaagttgctgttggccgtgagctcggtgtgaatgaatcgacgctatgtattagatcggtgtcgtaaatggaaacactgaacagaggttatgtattgatgagctggtgaaggtgctgtgagcagaggcctgcaggaacctcaccctgcatttctgccaggagcggcatctctcagcgcccactaatgccgtgttcacggcgacttcatggagtcagctatggggaataaccggaactgactcattcttggtctcccctgagagtcccgccttgtgtcccgcacgcgcggagctgcggactcccccgttggccgtcgctggcctgagccgctgtgcttgccccatttcagtgcacgacctgcgacagcagatgacagccttgcagagccagcttcagcaggtgcagctggagcggacgacgctgaccagcaagctgaaggcgtcgcaggcggagatctcgtccctgcagagtgtccggcagtggtaccagcagcagctcgccctggcacaggaggcccgcgtcaggctgcagggtgagatggcccacatccaggtacggcccacatctaccttccagggcaggtcacgcttcttgtcttcatgtagaacggtgctttttcctgagatttttctgtttttagagttcacaggcatgtttttgtttttaacctgctgtccagcccaccccgtgtcccatgtaggacgtgtcgtatgcaggacgtgtcccgtgggcccccccccaaccttctgacatgggagtcccacggcagcctctgccagcattttcagttccaaagcctctcttgctgggcatggtgacacatgccggtgaatcctcatttgcctgggtctcgggaccctcccaccctggcctcctgactcggcacagtgttgcgtgcctgtgaatcctcatctgcctgggtctcaggaccctcccacctcagcctccccactctgctgtgatgtctcacaggcgtgcggtgccagtggggttctcttcccggttggagcttttcctttccctgctgcctgagccctcagtgatacacggggaccacgtcttcccagcaggccttgcattttctacgtcctgttggaaaactctttcctctcccgtccactcgttagcgggcacagcccatgtccagcttggtcccgcatatgtgggagtgtgtgtccgtccaggcctgtgcctcggcccacagcaactgcttcgtgtgctggagacgcccagaccgacaggcgaatggttcgagtgaacctcgatccgagtctcagcacctagactaattaggatgacctcagagatgctgaagagtacctttggtcagcctcagtctttttgtttttggtttttttttgagactgtgtctcactccgtcacccaggctggagagcagtggtgcgatctcagctcactgcagcctcaacctctcagactcaagctattctcctacctcagcctcttaactagctgggatcacagacatttgccaccatgcccggctaagttttgtactttttgtagagacaaggttttgccatgttgcccaggctggcctccaactcctgggctcaagtgatgcctgcctcagcctcccaaagtgttgggattacaggcgtgagccaccgcacctggcctgttattttttaattagctgtggaatttttttttcccagataaaatattataaatttattaaaactttatttctcaagaggggaacgtgaaatactaattccaccaaatgttccttttacatctagagttacaaatatacacaatagaacttttcttcaattttcgttacttttttgtttgttttgagatggagtcttgctctgtctcccaggctggagtacagtgttgtgatctcagctcactgcaacctctgtctcctgggttcaagtgattctcctgcctcagcgtcccgagtagctgggattacaggcgcccgccaccatgcccggctaatttttgtatttttaggagagatggggtttcaccatattggccaagctcgtcttgaactcttgaccttgtgatccgccttcctcagccttccagagtgctgggattacaggtgtgagccaccacactcgactgttacatattttttaagccaaagaacaatacggaaaagcatttgttctacttacaacatagcttggaaacaaatcagtatacaaattaatacacttttttacagctgcagtgcatttatatgaggtatttaaagacgtaggccaagccaggtgtattttagaagtatagtttgggccaggtgcagtagcgcatgcctgtaatcccagcactttgggaggccgaggcgggccgatcacttgaggccaggagttcaagaccagcctggccaacatagcgaaactgcatctctactaaaaatgcaaaagttagccaggtgtggtggtgagtgcctgtagtcccagctacttgggaggctgaggcatgagatgtgcttgaatccaggaggcagaggttgtagtgagccaagattgcgctgctgcactccacacttcagcctgggcaacagagccagactttgtctcaaaaaaaaaaaaccaacaacaaggaagtatggtggtgtagcctggacaacaaaaagagaggaagctttaaagcaatggtggctccagagccctatctgctgttttttcggagacagggtcttgccctgtcacccaggctgctggaattcagtgttaccatcatagctccctgcagccttgacctgttgggctcaaacagtcctcctgcctcagccccccaagtagctgggacataggtgaacaccatcacacctggctaattgtttaaaagttttctgtaaggacagggtctcgctatgttgcctaagcaggttttgaactcctggactcaagcgatcctcccagcgtgctgggattacaggatgagccactgccgggccctcactgctttttccaaatacctttggaacccaggttcagcattccttaatcagagtttttaatacatttttttggtacccaaatgtatcccttcattcccagtaacgttcaggagggaggagaattccaggcagtcagtctgctttcatggtctcgaaacacagtcccagcaaaggctgtcttccctggctccgtgcaccttctcctgaggtcctggagcgtgtggcttctgtcacgtctcgcactgtgcactccaggaagcagcatggagctagaggcgatgcgggcaggtctagcctcaggccccaggctgtcctcacacctccttttcagtgctacttcccttggctgacgccgtcctcctcagggccatggtcctgggctttttcacgagacgcttggccagcgtgggcctgagcacctggaggtctgggccgggccctagctggctgaaaaggctgtatccctggaatggcacctgtcgggcgtctggctgagggcaggccctggtgtgtgtctggctggatttgttcagttaagataagcctcctcacctacaggggctcagagatgcccctcctcacccacaggggctcagagatgccttgtcaatggggacttttgggtaggtcctgctacaaaccgcagtctgatgagctacaaacagcatgatgagcgctggctgatggcccgcccgccctcccactcaggcacgcagagcccagacagcgcatattttgagatgggaagacgtgtagtgggtagtggggcttgcgtgggagacactgagggggcagccagtgaccctcaccctggggcctccagggacaggctggtctgcatttcttgcttgaaattgagcaactttttactttgtgggttttttttttaaggttggacagatgacccaggcaggtctcctggagcacctgaaactcgagaatgtgtccctgtcccagcagctgacggaaactcagcacaggtccatgaaggagaaggggcgcatcgcggcacagctgcagggcattgaggtgaggctgcggccggggccgtggaagcttaggagaacagacgcagacatcgataccatgtgtgttttcttacatgttccgtctctctgtgtgtatctcttaaatattctcatggatggcgggcagtgactgctcgttaaggctttgggaccccccccccacccctcatccctcacctgtgggggcttagcatggatggcctgcagtgactgctcgttaaggctttgggaccccccccacccctcatcctcacctgtgggggcttagtgcagtgagcacttgcggctcttttcctgcaagccccgccttgggcctgggcccccggctgtcagtcattgccagtcagggatggcgctgggtacagagtgggtacggaggaaggggccagtgcgtttttgcctgacagcctgtcgaagcctagggatgagaggattttctttgcttactgagcactcagactgcattgccatttaaccctccagcaaccacacgctgtcgaggtcatggccgctgcctgcacagccatctccagaggacagaaatgcagcagccttgatagctgttctcctttagctgtggggcgctggacaatttcttacctctctgagccgcatcttttttttttttgaggtggaattttgctcttgtcgcccagggtggagtgcagtggtgcgatcttggctcactgcaacctctgcctaccaagttcaagcaattctcctgcctcagcctcccgagtagctgggattacaggcactcgtcaccataccctgctaattttttgtatttttagtagagacggggtctcgccatgttggccaggccagtctcaaactcttgacctcaggtgatccgcctgcctcggcctcccaaagtgctgggattacaggcgtgagcctcatctttataaaatggggatagtgtcacctactcgatagccttgtggaaaaattaaagaagaagaaatggtgtaaaaccccaaggcagtgtatggagggaggttctgtgctggatgttgctgggctggtctcgttgccgatcttgccagttgtacagggagctctctgcagcctcacgtggtttctcatctcctgcgactgctcccacctctctgtggcattagctgggctgcccggctgggatgagaagaatcacgttgcgtcagccatagtgcttcaagggcttagtagagaagaactgaaaagaatttcaagtttcaagttaggaatttgtgttttccctaagaagtgtaccccgatgtgaggctgtgttcactgcgggggcctctggtctcttacccggtagcaccaagcaccgctcttgtgagagcatgtccgggtctcactcccgaaaggaggcagctgtcgccacacgagaaagtcggggaggctctgctcaccagtgggtccaagtccttctcacggggttgctggcctgggctgggcctggcctcggtctcctggttggggggcggccaagctgcccatcctgggccctcagtctgcagtcggtagacaggatgaggaggtggatggggcccatgccagggcggtgggtttctctgcagagcacggggccaccggctgctgttcactattaaggtttcctgcctttttaaaaacaagtttcctgggctcaggctgacatgttggatcaggaagcagccttcat

SEQ ID NO: 339 - DNA, 262 bp, Homo sapiens
tgtaccccaggctggagggcagtggtgcgatctcggctcactgcaagctccgcctcccaggttcacgccattctcttgcctcagcctcctgagtagctgggactacaggcaccggccaccacgcccgactaatttttttttgcatttttagtagagacggggtttcaccgtgttagccaggatggtctcaatctcctgacctcgtgatccgcccaccttggcctcccaaagtgctgggattacaggcatgagccaccacgcc

SEQ ID NO: 340 - DNA, 1671 bp, Homo sapiens
agctggcgtcagggacttcctcgggctccctaaggacctgctctcccagttctctactcttccctctgaggcagaggctgggcaggacccacaggcagcccttagtgacccgcactccacaccctgtctgccttaggagaaatggggtctgtgaatctgggctctccctccatgctgccgtgtctgcggagccaggtgccggcgtggcctctgctagccagcagagtgagcatgcacagctggtccagggcacggtgttttgtttgcactgttccagacatcgtcatctccatctgatgatgatcactcggcagctttgagccctggcacagcttcgggtcgaagcacgttcccttttcaggagagttgagccgagctttccttcacgcagacttaatttcctggacttagtgctaacgtcaagaccaaacctgtaggaaaagagctttaactacacaaacacatactgacagattcagccaaactccgagagtcccagaccggagcctgtgtccctagcgcaggtgtgtctgtcgggcagccgacggtgcctgtgcaggcagtggctggacaccactactcccttctcttccctccctgcttgatcgcgctgtgggattcctgatgctgtgtgggtctctggctccccctgctgtagaaggggagtactgcccctgggacacagaactgcaaggccagtggcgccaggtacctcccacaggaagaagatttgaggacatttaaaggtacccactttaccccgtgcccaccttctaccccagctccctggcagccatccaaaatttgcctccaagagcatgtctcacagacaaaggtctgtgttttatggaactgtgctgacgggctctgcacacatctcactgggctactctccctggtcccagcctgcccagacagtcaggcgcaaagtaacatgtgagtcagaagaggttctggaggaagttggagaaggctccagaagtggcctcatggaatgcggccccatctatgccgcatatgttttactgcaagctcatctccagccaagacttggctccttctctgatgcaggaaacctatcgccagtgcaggtgcctttaatgtttctctgagaaaggaggaaatgctggcttgtgctgtcgataagtccccaaggctgcatgtattagcaggaagcacagcaggactctgagagaagaatgtgtctcttctctttgttgctgagaaggtagagaaaggccctgcactctttgacttaccttcctcagtcctgtgcatccaggctgttaggtgactctgctgtgacttagtcccacccagcaccataaagaaaggcaaattgacggccgggtgcagtggctcatgcctgtaatcccagcactttgggaggccgaggcgtgtggatcacctgagatcgggagtttgagaccagtctgaccaacatggagaaaccctgtctctactaaaaaatataaaaaattagtcgggcatggtggcacatgcctgtaatcccagctacttgggaggctgaggcaggagaattgcttgaacctgggaggcggaggttgcggtgagctgagatcgtgccattgcactctagcctgggcaacaagagcgacacttcgtctcaaaaaaaaaaaaaaaaaaggcaaattcacctcagaaaaagtc

SEQ ID NO: 341 - DNA, 1671 bp, Homo sapiens
agctggcgtcagggacttcctcgggctccctaaggacctgctctcccagttctctactcttccctccgaggcagaggctgggcaggacccacaggcagcccttagtgacccgcactccacaccctgtctgccttaggagaaatggggtctgtgaatctgggctctccctccatgctgccgtgtctgcggagccaggtgccggcgtggcctctgctagccagcagagtgagcatgcacagctggtccagggcacggtgttttgtttgcactgttccagacatcgtcatctccatctgatgatgatcactcggcagctttgagccctggcacagcttcgggtcgaagcacgttcccttttcaggagagttgagccgagctttccttcacgcagacttaatttcctggacttagtgctaacgtcaagaccaaacctgtaggaaaagagctttaactacacaaacacatactgacagattcagccaaactccgagagtcccagaccggagcctgtgtccctagcgcaggtgtgtctgtcgggcagccgacggtgcctgtgcaggcagtggctggacaccactactcccttctcttccctccctgcttgatcgcgctgtgggattcctgatgctgtgtgggtctctggctccccctgctgtagaaggggagtactgcccctgggacacagaactgcaaggccagtggcgccaggtacctcccacaggaagaagatttgaggacatttaaaggtacccactttaccccgtgcccaccttctaccccagctccctggcagccatccaaaatttgcctccaagagcatgtctcacagacaaaggtctgtgttttatggaactgtgctgacgggctctgcacacatctcactgggctactctccctggtcccagcctgcccagacagtcaggcgcaaagtaacatgtgagtcagaagaggttctggaggaagttggagaaggctccagaagtggcctcatggaatgcggccccatctatgccgcatatgttttactgcaagctcatctccagccaagacttggctccttctctgatgcaggaaacctatcgccagtgcaggtgcctttaatgtttctctgagaaaggaggaaatgctggcttgtgctgtcgataagtccccaaggctgcatgtattagcaggaagcacagcaggactctgagagaagaatgtgtctcttctctttgttgctgagaaggtagagaaaggccctgcactctttgacttaccttcctcagtcctgtgcatccaggctgttaggtgactctgctgtgacttagtcccacccagcaccataaagaaaggcaaattgacggccgggtgcagtggctcatgcctgtaatcccagcactttgggaggccgaggcgtgtggatcacctgagatcgggagtttgagaccagtctgaccaacatggagaaaccctgtctctactaaaaaatataaaaaattagtcgggcatggtggcacatgcctgtaatcccagctacttgggaggctgaggcaggagaattgcttgaacctgggaggcggaggttgcggtgagctgagatcgtgccattgcactctagcctgggcaacaagagcgacacttcgtctcaaaaaaaaaaaaaaaaaaggcaaattcacctcagaaaaagtc

SEQ ID NO: 342 - DNA, 1671 bp, Homo sapiens; identical to SEQ ID NO: 340

SEQ ID NO: 343 - DNA, 492 bp, Homo sapiens
atgctgtaacttctctttctgtttcctttcccatgctatttcatcccctccttccccacctcatttctccaccccttgaccctgggacactagccgggaaccagaggctccagcaggtcatgcacgcggcggatcctctggagatccaggctgacgtgcactggactcatatccgtgagagagaggaggaagagaggatggcgccggcctctgagtcctctgcttccggaggtaaacactcccagccccaggccgcagtgtgccccgagcaccacccgcctgctgcctctgtcgccacagggggcctttctgtcagggcagagccacccatgaggtcacacacgggagccaggcgcatcccgctttgctgctgtcagttgtgacacctgtacttttcatctgaggatatgtgaagttctctgtggattaagaggttgtggactctttctccattgatgcaaaatggtaaaatgaacctgatcttgggtaaac

SEQ ID NO: 344 - DNA, 287 bp, Homo sapiens
gctccgaactctgccctgccccccaaagtgatctgtttcatgcgtgagtgtaagaggtttctggggctgacgtcacacggacgtgcctcctgcacagcccagggaccacccctcctgacataagacatggggggcagaggggaggacaccgtagcgttgagcaggcggttggcagtggaagtaatgtcccttgtgcacattggtttagaaactggaagtggaaggcagagagccagtccaagtactcatccaagttaggccactcctacttgtctccacctcgtttt

SEQ ID NO: 345 - DNA, 492 bp, Homo sapiens
atgctgtaacttctctttctgtttcctttcccatgctatttcatcccctccttccccacctcatttctccaccccttgaccctgggacactagccgggaaccagaggctccagcaggtcatgcacgcggcggatcctctggagatccaggctgacgtgcactggactcatatccgtgagagagaggaggaagagaggatggcgccggcctctgagtcctctgcttccggaggtaaacactcccagccccaggccgcagtgtgccccgagcaccacccgcctgctgcctctgtcgccacagggggcctttctgtcagggcagagccacccatgaggtcacacacgggagccaggcgcatcccgctttgctgctgtcagttgtgacacctgtacttttcatctgaggatatgtaaagttctctgtggattaagaggttgtggactctttctccattgatgcaaaatggtaaaatgaacctgatcttgggtaaac

SEQ ID NO: 346 - DNA, 287 bp, Homo sapiens
gctccgaactctgccctgccccccaaagtgatctgtttcatgcgtgagtgtaagaggtttctggggctgacgtcacacggacgtgcctcctgcacagcccagggaccacccctcctgacataagacatggggggcagaggggaggacaccgtagcgttgagcaggcggttggcagtggaagtaatgtcccttgtgcacattggtttagaaattggaagtggaaggcagagagccagtccaagtactcatccaagttaggccactcctacttgtctccacctcgtttt

SEQ ID NO: 347 - DNA, 492 bp, Homo sapiens; identical to SEQ ID NO: 343

SEQ ID NO: 348 - DNA, 287 bp, Homo sapiens; identical to SEQ ID NO: 344

SEQ ID NO: 349 - DNA, 418 bp, Homo sapiens
gagaaagttaagagggaaattagtgtactatagagatcagtagtagagaggggcctggcgggatggctcacacctgtaaccccagcacgttgggaggccgaggcaggtggatggcttgatctcaggagttgaagaccagcctggcaacatagtgagaccccatctcaattgtgaaaaatcatattaaatttaaaaaaacagtgacaagggaaagggtctttcctgtttcccttcagtcatttacaacattttacaaaacactataggtaagaaagaaggcaaatctgtaatcagggaaaggagggttccagctagctaggtgaaagttgtgtgtcatgtgactcaaccccatgatcacattgcttcaagatgatgtagagattcatcagcttaaatttttgaattacttggttgtttt

SEQ ID NO: 350 - DNA, 489 bp, Homo sapiens
gagaaagttaagagggaaattagtgtactatagagatcagtagtagagaggggcctggcgggatggctcacacctgtaaccccagcacgttgggaggccgaggcaggtggatggcttgatctcaggagttgaagaccagcctggcaacatagtgagaccccatctcaattgtgaaaaatcatattaaatttaaaaagacagtgacaagggaaagggtctttcctgtttcccttcagtcatttacaacattttacaaaacactataggtaagaaagaaggcaaatctgtaatcagggaaaggagggttccagctagctaggtgaaagttgtgtgtcatgtgactcaaccccatgatcacattgcttcaagatgatgtagagattcatcagcttaaatttttgaattacttggttgtttttgcttgtttgtttgttttgagacagggtctcactctgtcggctaggctggagtgcagcggcgtgatctcag

SEQ ID NO: 351 - DNA, 306 bp, Homo sapiens
agaaaaagaaggaatgttctctgttacagagtagggcatcctcataaagcaagtggaggaacatactgtctaagtttttgttatgtaggggtcttgtctatgtaaagactaaactaagctgtgcctacgtgcatgtgggctgacagcgtcacaaaatttattactctgttgatttaaagaaaactatcctttaccttttagcacacaagtgcattaaaacataactataattatcttgaaagcacatactattatgagtattgggacatccggatgttctgtcgttgtgggagtgtaaggatactt

SEQ ID NO: 352 - DNA, 306 bp, Homo sapiens; identical to SEQ ID NO: 351

SEQ ID NO: 353 - DNA, 315 bp, Homo sapiens
aaattttttcacattctccagggcaactggtttccccttacattttccaaatatatgggatgcagcgtctcaaatcctccaccctcataccacagcctaactcttcaagggtttgcagtgaaatctgtttctgaacatttcacatgagaggaaagcagagaataaccactagacatttgcctgaaaaatcctttctgcctctcctccttttatctttcctagacacagacaccttatcaggatgtctttgggatgaggttcctttctggaaactttacagggtgatgtgtcttcagtacaccctcctatcttttc

SEQ ID NO: 354 - DNA, 315 bp, Homo sapiens
aaattttttcacattctccagggcaactggtttccccttacattttccaaatatatgggatgcagcgtctcaaatcctccaccctcataccacagcctaactcttcaagggcttgcagtgaaatctgtttctgaacatttcacatgagaggaaagcagagaataaccactagacatttgcctgaaaaatcctttctgcctctcctccttttatctttcctagacacagacaccttatcaggatgtctttgggatgaggttcctttctggaaactttacagggtgatgtgtcttcagtacaccctcctatcttttc

SEQ ID NO: 355 - DNA, 4978 bp, Homo sapiens
gggaaatgaggaccaccgctccggggcgcgagtaggcgcgtggagtccgggggctcagccgccgcgcctcttcctcctgcagctggagactgcaacagcggcgggtgcaccggcagcagcgacgaccctgcgcgcaggtgggcacccccgagcgcggcgctctgccggctcccccggccaccgcgggccggacgcccgctcttccaggccactgcgcttgggggcgagggctgggtaggtccaggggcagaaggaaggtgcacggccccgtggtgggcgcgcttctgcgcgcgcgctgtggtaggtgggaaagaggtgcagaaaagctgcctcccttagggttcactccctcggttccactgtccccaccccaccccttctgaggagctgggcacaccggtggggctttggaaaactgcgatctcctacccgccccgcagtatcggtggcgtgtgcaggttgcccttctcttcacagtccacacccagcaaccatcaggacgccccctgctcccggcccgaagactgtagggaccatgggaggagagagtggtggctggaccggtcggggcgtgtgcgcggaaggctggagttgcttgagtattgtctgccggggccggcgcttgcgtcagggtgctccctcgcgctttcgggggtagggaatgggtttgctgaacttactctgagggctgatactgcacatgcccttggcgccttgtgcatgtttggacaagggtttaatggaggcacgtgggagcagtatcgatctctggcgggtccccaaagaccctcttgggatagtccagagcgtgttcggggttgagagcgaaaggagagtgttccgtgtgaatgtgcgtcctagggaggaggaggacagtgtctcaaggagacttgattttcttttatttgctgcaattccgtaaaccaaatcatgctttcgaggcgttaaagtaaattactggtaagtggggcggatctctgctggggataaagaagctcccgggtttgcggggtagcgggcctggctggcgtgcacgctcggtggcttttggcgctgtctcgcctaggtagtgggggtggaggtggtggtgcttgtgtctttggcttaaggtgctggagccgggcttacttgtcctaggtagactgtgggacttggaggaggtaaaaaagcttcgcggcgcggttattcgcaattaactccagaaatctcagtgtgtgtctgtcggtcggtctctctctgtctctgtctctctctctctctctctgtctctgtctctctctctctctctcacacacacacacacacacacacacacacacacacacacactcgcacgtctcatggctgcttggatttgccgatagttgttcatgaatttttattcctgtttgttcatttcctgacttttttttttttttttttggaaaaaggacctacctgtattaaaatccgtggggtttcagaaagacccttccgcagtcattcatattcaaatcaaggatagggcattttgatgaaaataccccaccaaactgctgtttggattggacaaaactgtagttcaggttagaattactgttattttaaatagacatcttacaaccttgtggtaaagtaaccttagcctgaatcgcccctgatctttctttgtgtcaatttacagaattctgaattacagatgaacaaagcggtgaagttttcttttaattttaaacgacaggtcttgaaatggctgtaagttgagttctgcgactccatctctttaatgatcggctcagagtggtgtatagttgatgatctgagacttacatatgtttcaatttctaatcaaataatttatcataccattggggagaaggacgccttaggaattttcaacacagaggagaaagaacatttttgtcttttggagcaaatgttttgccactttttccccagatgtccccgttagatgcctagaaaagatgcattgttgacgaataatacatgatttatttctcttttatgtctacaggtggcagtgtagaagccagaccgggagcttccagaagtggtttctgaaagagtcaaatgtacatgagtaagcaagcacaggaatctgaaaaaccacaggtatgtaggacaattaatccacctatctagctttataattattgcattccagtagtactaacccatttgctcttatgttcaatattttgacacttatataaatttctatgaagtgaaatgtattttgaggtaacctccgaggagaagcagggtctaatctatttctgacaatgtatttaaataaaaattctgcatgtcattatattacatgactttttactgttctaaaagagttgtttttccattgtgaccatgtggctttgcatttaaccagttgtttgatatctgcttttcaaaacacttttcctgaaactacataaaactgccaattgttctgaataatttcatttgagataatgttaacagagtcacctgcatgaaccaataacaatatcagcttaaaaattttttttattttttggctgggcatggtggctcacgcctgtaatcccagcactttgggaggccgaggcgggcggatcacgaggtcaggagatcgagaccatcctggctaacacggtgaaaccccgtctctactaaaaatacaaaaaattagccgggcgtggtggcgggcgcctgtagtcccagctactcgggaggctgaggcaggagaatggcgtgaacccgggaggtggagcttggagtgagccaagatcgcgccactgcactccagcctgggtaacagagcgagacttcgtctcaaaaaaaaaaaaaatttttttttttttttttttttttttttggtgacagggtttggctttgttacccaggtggagggcagtggcaggatctcagctcactacaacctccatctcctacatcctacatctcctacatctccatctcactacaacctcccacaacacgccggggttgtttttgtattttttgtagagacagggttttgccatattgtccaggctggtctttaactcctgggctcaagcgatctgcctgccctggcctcccacagtgttaggactacaggcatgagccactgcacccagccaagtatcagcttttaataaaactgcatctcactgttgaattgacgtaacaccgatcagaatacagatgcattaggaggcttcttttaaaccaagcccttctgctattaaccttctgatgatttttctcctactaccttgctgtttttacaggcccactaatttgcctgcttgactaaaataaggacgagttatgtgctgatgagagacatgtttgtaatgttattcgttgtgacacagttcaaaagaatttgcctttgattctcactaaaatgtaaagttttgcatattaagatcctttttcaacaactgagcaactctttataatgaagggcagaagacgccaaagggaagaaaatatttacctttgtgggcttttactttctttcctgggaatggtaggccatagctattggtatgtttttttttgttgttgttgttgttgttgttgttttttgagaaggagtctctctctgtcgcccaggctgtagtgtagtggcatgatctcgactcactgcaaccttcacctcgggttcaagcgattcccctgccccagcctcctgagtggctgagattacaggcacccaccaccaggcccggctaatttttgtatttttagtagagacggggtttcaccatgttggtaaggctggtctccaactcctgaccttgggtgatcctcccgcctcggtctcccaaagcgctgggattacaggcatgagccagcgcctaccaccgctattggtactttcacacggatgctaaagttattgtgctggccgtgttaagggtcaggcatcaaaatggccgctcaagagaatgaagctttctctttgtgcagatgcaacgggtgggatggggtgcacaattatcacagtgctggttgtggtgttacctcgacattctgccttacagctgaggagggatttgtttcgtccctgctaatgaaggtgttaaataaacttggatgctgttattgaagcttaaaaaataaatggaagctgggtgcgatggctcaagcctggaatcccagcactttgagagaccgagatgggaggattgcttgagctcaggagttcaagaccagcctagacaacatggcaacaccctgtctctacaaaaaattacaaaaagtagccaggcgtggtgatgtgcacctgtagctatgtgtacctgtagtcccacacagtcgggaggctgaggtgggagcctcccttgagcctggcaggtcaaggctgtgatgagccacgatcatgccactgcactccagcctgggtgtgacagtgagatcccttcttaagaaaaaaaaaaaaaagaaaaaaaagaaattgaacacttaccagtagaaagcaaacagggagctcagactcagaaagtgtagattgcactaaatactgaagggttctcactttaaagactccatggataaggagtggcttcaggaaagctcttgaacatttaggaacatgtaagtttgcactgcatgagacttagattcattatctgactcaggaaattgggatgtaactaattatccctcaaaatatctaacaggaatggagtctcctcagtcaaaaagaaaaagaacaaggttgatattttattccttttttgaattatagtatatttgttgtagagccattaggtgctttagagatatttgacttttgacatataacatacataataaagtgtgtaaaaggtactggtctaaagtgtactgctcaaggagaatcacttgaacccaggaggctgaggttgcagtgagccgagatcgtgccgctgcactccaacctgggtgacagaatgagaccctgtctccaaaaagataaataaataaataaataaataaataaata

SEQ ID NO: 356 - DNA, 461 bp, Homo sapiens
gaaacaaagaaaaagctaccagaccagatattccctcatcagaaaatgaatgagaattttattatctcttggctttaaaaaaaattctgtcctttgccagatctgaaaatgctgccaacctggaagaaaaagaacccatttttctaaacaacctcatttagtaatttccatgaaattgacattttagaactatgacaaaaagccaaattaaaactcaggggttcctaatccctaaattctgagtccgttttaagaaatacctaaaatacactttaaaacgaaccaattaatataattaccgtgggtttaaataacacatacacactggatttgtttctgtaaaacacagctgttctgttatttacattttgctattttttaaattagaaatatggctttatatattgtacatatatgtaaagtaactttttaaaaagagtgaatctgttgtcttctgccat

SEQ ID NO: 357 - DNA, 1200 bp, Homo sapiens
agcatctctgcgtgagatggagcgagaatcgctggctttccagaggaggaagtaggtacagagaggctaagtgactcagagacaaaggactgggggatggctggatagcctgtgtaacctgtgtcagtgtaaagatcatgaaaggcactgctgagtggttgacagttcagcttttgctgccgggcagacccaggttcttttcccaggcatgccccttggtaaaagggataaatgtgggcacctcctgtaacgtctccaagcttccctttcctctctaattgagcaaggatgttataaggctctaaccacaaccttcttgggaagattcagtgagataaagcatgcaaagttcttagtcccatgccaggcatgtgattagctcgttggatttagacccgagtttttttctcttggctgtgattctctttgtgccacccacacagccccctggtgctttggggaccttgaagagcccagagggtagtgttagacccagataacccatcccgatgctgatacccggatgcctgggtttacccagcgtaggtttagtatctgctccctccctgtctcttggggaacggttcctactgtatgttaaaatctaagttgtcaaggtaaaataagccgcttatttctgctttttcaaagttcaatttcattcactttttaaagtattaatatttgtttctatcaaagtaatagatgacatcatttaaaagtcaaatggttccacaaggctgattatgacaaacagcttcctccctgcaactcctgccacttgcaacagttttagctgtttcttctagtatttgcctccatatagataaataattgacacagggcattattccttgattgattcacttttaggttgttgaattcctgttaaaaatggatgaagacggccaggcacagtggttcacacctataataccagcactttgggaggctgaggtgggaggatcacttgatcttaggagcttgagaccagcctgggcaacctagtgagatcccatctctacaaaaaacacaaaaattagtcgggtgtggtggcacatgcctgcagtcccagcttctctggaggctgaggtgggaggattgcctgagccccaaaggcggaggttgcagtgagtccaagagtccagatcacactactgcactccagcccggtggacagagcgagactttgtcacaaag

SEQ ID NO: 358 - DNA, 1034 bp, Homo sapiens
agcatctctgcgtgagatggagcgagaatcgctggctttccagaggaggaagtaggtacagagaggctaagtgactcagagacaaaggactgggggatggctggatagcctgtgtaacctgtgtcagtgtaaagatcatgaaaggcactgctgagtggttgacagttcagcttttgctgccgggcagacccaggttcttttcccaggcatgccccttggtaaaagggataaatgtgggcacctcctgtaacgtctccaagcttccctttcctctctaattgagcaaggatgttataaggctctaaccacaaccttcttgggaagattcagtgagataaagcatgcaaagttcttagtcccatgccaggcatgtgattagctcgttggatttagacccgagtttttttctcttggctgtgattctctttgtgccacccacacagccccctggtgctttggggaccttgaagagcccagagggtagtgttagacccagataacccatcccgatgctgatacccggatgcctgggtttaccagcgtaggtttagtatctgctccctccctgtctcttggggaacggttcctactgtatgttaaaatctaagttgtcaaggtaaaataagccgcttatttctgctttttcaaagttcaatttcattcactttttaaagtattaatatttgtttctatcaaagtaatagatgacatcatttaaaagtcaaatggttccacaaggctgattatgacaaacagcttcctccctgcaactcctgccacttgcaacagttttagctgtttcttctagtatttgcctccatatagataaataattgacacagggcattattccttgattgattcacttttaggttgttgaattcctgttaaaaatggatgaagacggccaggcacagtggttcacacctataataccagcactttgggaggctgaggtgggtggatcacttgatcttaggagcttgagaccagcctgggcaacctagtgagatcccatctctacaaaaaactca

SEQ ID NO: 359 - DNA, 295 bp, Homo sapiens
ctttccttctgtaactacctcaacacattcactgcacagaatagttccaccaattacaaatgttcagaataacggagggcctggtaatgatcaaattcagttctgtgaaaagacctcattttgggacagttgctgagccaggacttaaactgggctcaaacccagcacactaagaggacagcattttggggttttgccgaatggagggaaaagataccataatgcagttccaggtacttttagattctttcctctaagaccccactttctcattataaagtggaaataataatac

SEQ ID NO: 360 - DNA, 295 bp, Homo sapiens; identical to SEQ ID NO: 359

SEQ ID NO: 361 - DNA, 341 bp, Homo sapiens
gtttacccctctctgtagagtaatgtagattgtttaccttacatctcatgttatgggtattcatagttttttttaattgttattgtgaatgacatttttttctattttctgactcatatttgctgacatacttgaaagataatgattttttaaaatatttatatgaaatccgagccctttattctcaataattgtaagaattgattttatggagctttttgatatctaataatcatatctatgagtaatgaaaatttactttcccttcctacatgttatgtctggattggctagaaattccagagtaatgttaactaataatgttaacaatgggtgttctt

SEQ ID NO: 362 - DNA, 351 bp, Homo sapiens
gcagttggagtttctctctttccggaagactataaaggagagctagaggagagcagcactgcatctccactaaactgagggcttgatttgctgcccatcatgctgttcttatgccattgttagaaaaacccgaagctttccaatttcatccatgtccctacaaaggacatgaactcatcattttttatggctgcatagtattccatggtgtatatgtgccacattttcttaatccagtctatcattgttggacatttgggttggttccaagtctttgctattgtgaataatgccgcaataaacacatgtaccctaaaacttaaagcataattaaaaaaacaaacaaaacaa

SEQ ID NO: 363 - DNA, 2304 bp, Homo sapiens
atccacacaaccttaaaggattaaaggatggtttctgtgcaactgaaacatatgcacagaatgacaatagtcgtgatactttctttattcttttttttttttttttgagatggagtctcactctgtcgccctggctggagtgcagtggtgtgatctcggctcactgcagcctccatctcccagattcaagcgattctcatgcctcagcctcccgagtagctgggattataggtgcacgccacccgcctgggtaatttttgtatttttagtagagatggggtttcagcatgttggccaggctgatcttggaactcctgacctcaagtgatccgcccacctcagcctcccaaagtgctgagattacaggtgtgagccaccacgcctggccagtcatgctactttataatctgaagttaccagttctttgcagtgtttcacattaggggcattctccaaagggaactttagagataacaaatatgttaaaaatatcgaataaagttagagatgtggggagacattcctactcctacagagagcaaccataccttcctatagactgtgcactgaagaaagggcggaggggatgcgcctgttagagttagaatcttggcttgataggcaaggaaattgacccggtgtggtggttcttatattggtaagaagacccttctttggtttctttttttccagatagctaaagtcaatgtcagtgattgcttcaagcatgatagtcttaccagcctacactctaagcttttcttatgcttccagaatgacttactcagcaatcacttctactttgtattaaaacagttttggttattcaggtaggaagaagagaaaaaaaccaggctgtttccagttgtctggggtttacattatgttacctctcagactgttagtgaaatcagggagactagtggtttttacggcatcagagataccaaatgtataacagacagatgtcatcttactctttttaagtcatggacaaaaagacagacacattgccctgtaactttcagatcttctgtaacctttttaaacaacataggagagaagttggtacttgtacccaagggaagagaaagttaatgagtagaaaagacagaatttatttaggaaaacgatggaattaagctctggacaaaacatgcatcagtgatgcataacatttttgttaattgggtcttaacaggtttctgactcatatggtaatcattgtagaagtgggtcttactagaccacgccagtggcaaatcgcgaagctgtaagaactcttacctccctgtgtgtgtgcacctgagtgtgtgggggggcgtacgtttctgtagcttaatttaggttccacatacacttcagtggttaaacctgagctagactcaaatagtttgtttccattaagaaaatgaatcttttatgtggaccaaggtcaggttagttaatttgtttgcttttattggaataacttttcccattccaattcatcacttaattttaagtggttctactaaaatacccattaaagtcctttacatttctcacagactagggctatgacagattcataagacgtttcttttttcctcaaggcacaaaaggtagcttttctggtcatcaacctagtcttccttgttcctaatttcacaacagtggggcaacattttatataataccaatatgaactctaattgcaaagagactaaatgaaatcttcacacgaagcaagattaattaaaatataaaatgtgcttgactgtggtaaaacatttcttttaaaaaaaatagtatgacttttttttttttttttgctaaatctttcttttttgtacacctcaccctcttcttcactgatgcattttccagcaactggaagttcactctggctaggaaagtaactaaatgtgatgttatcattctaattagtgattacaaaagatcaattaatgttataattaaaaacagtgtctagatctgttgtttgtagtgaataaatgtgacaattactttgttcattgacatagatgtgttgaatttcctccctagattttaaggggatgcattttagtgctgatgtgtgcatttaactgtggacagtaggaacaaggcaagcatattaggggaagagtagggcccctaatgtctaagctacagacatattttagcatgcttgacacctttccttggtatatgatgctatatcagcaacttgtactcattggatctggagcctctagcttttaatattttatcactaaatgcttaagtgtttatgttgcaaaaagaaaaggaaaaaaaaaa

SEQ ID NO: 364 - DNA, 330 bp, Homo sapiens
tacttatgtttttttttttttttttttttttttttgagacggagtcttgctctgtcgcccaggctggagtgcagtgacacgatctcggctcactgcaagctccgcctcccagattcacgccattctcctgcctcagcctcctgagtagctgggactacagacgcccaccaccacgcccggctaattttttgtatttttagtagagacggggtttcaccgtgttagccaggatggtcttgatctcctgacctcgtgatccgttcgcctcggcctcccagagtgctgggattacaggtgtgagccaccgcgcccggcctacttatgtgtttt

SEQ ID NO: 365 - DNA, 276 bp, Homo sapiens
cttgcgggtacgagcgacaaaatcatcacgctgggtatcggaaagcagcgccgccaccacaccaacggtacgcgaggcattctgcacatacaccgtcgggccgctgtagttctgctcgattttcaccgccgtgtgcgcttttgaggtcgtcgcgccgccaatcagtaacggaatagtgaagccctgacgctccatctctttcgccacgttaaccatctcgtccagcgacggcgtgataagccccgaaaggccaatcagatcagcattcacttcttt

SEQ ID NO: 366 - DNA, 220 bp, Homo sapiens
atgttgttttatgtatttgaaaatctctttaatgtacggcttcatcaaaggcagctgaatttgcttatctgcctttatccttagtgtatctcagtaaatttggttttggttgaagtaggtaaagaaaaccctgctggcctaatacagatacataggttaaaaagggacgactattttaatagttgttcaggcaattgtggatattcttttttgatgttac

SEQ ID NO: 367 - DNA, 507 bp, Homo sapiens
aatactttggggttgagatttaataaaattaataatttttaccgcttcaaggacgttattacattggggaacacaataaccactaatatagcttatgctactgtcttgcttcatgctgagatgccagcaatgttatcatttattttttgtgccctatcacttaaatgtcaacacagtgaaaagggttgtaaataacatctgagtgttatgaaaatagcttcaatctctgagactcctcgaagttccctttgggaacttctgctctaggtatgaggatcagtgctcttagcaatttggttggaaagaagagtctttgaagaatgataactgtgagagagaaagtcaaataggtaggtagaggccagagaatgtgctaatgtacttaactgaccttgcttttgttaatgaaacatgagtgatgcttatgagaaaaggaatgccctttgtaaggtagagtttaaagaaagtatatctgatattggtggctagaatatgtttgtggggtaa

SEQ ID NO: 368 - DNA, 309 bp, Homo sapiens
cttgtcaaatagggaatggtattcatcctaccttatttctgttcatcctagagacactatagaggggatgcttttaggtacaggttaaaatcaagtaactttttggcatccttccagatctaaggttctgaagatctttggtacattttatttaacaaaaaatgttgatgcccaagttttctggattagttcaagtacacctgtaatacaggtggcctcctgtgtggaatgcccttcccactcctgccctgccttacttgctcctccttcttacctcccgcaggaagcactgtcagggcatcacccccc

SEQ ID NO: 369 - DNA, 309 bp, Homo sapiens; identical to SEQ ID NO: 368

SEQ ID NO: 370 - DNA, 309 bp, Homo sapiens; identical to SEQ ID NO: 368

SEQ ID NO: 371 - DNA, 302 bp, Homo sapiens
gagccacagtgcccggcccgaaaagtctttattacatacccttgaactaggcactggagaaaagttctattagtcttcatctactttatgttctgaagctaaaatcagggtttatgctcttgccaacaagcaaaatatttagaattcagacttgtctagaacattagagatgtctgggcatagttgatcctaagatccactgaatgtataagctagtagctgagactagatttcttcataaaaagatgagtagggcatccccggcttagaatcaaatgtgtggtccagatggcagtatagga

SEQ ID NO: 372 - DNA, 169 bp, Homo sapiens
ttctttttttttttttttttttttttttttgagacagagtcttgctctgttgcccaggctgaagtgcagtggcaggatctcggctcactgcaaactccgcctcctgggttcaagcgattctcctgcctcagcctcctgagtagctgggactacaggcacccgccaccac

SEQ ID NO: 373 - DNA, 456 bp, Homo sapiens
atggtaataaaaataccttcaggccttttggagttagtagaaaaatactgtagtttttagacagaaacgtctggagggctaagatttagattccgacattccagtttgatcaaaagcagctgacattatcatcattgcaactatttataaaatgctcgttgtgggcagatactgcaccaggcacttcaggaacattcatcttagatgaacttcaaagtaacctctgatgtagtgttctgtcatccccaggtcttggatgatacaagtcaggattagtatgcctgaggtcttttggccttggatcaaactgggatttgaacacacctctgtccacccctaggcctgtgttcttaggcaccataatgttgtagcactcacctgtgaggaatggatttttttcattgccttggatttttttcattgccttgaattattttcagatatgaaaaacattgt

SEQ ID NO: 374 - DNA, 366 bp, Homo sapiens
ccttcctcttgaaataaagcaaataaagtgctaactggttagggttgagcaagagcttcttatggtcattatattgttttctgggtctacaaaataggatgttcagactttctgggcttatattaattaagcaatccttggggttgtcccatcccctgaatccctgaaaaatattgcagctctcgtggtgacttttgtgattctccacttttccccccttggataaagcacttcctttcaccatgaggccagattgggatgcagacgtgacccagcacaattagagctgctgctggttcgtgcccctggtgaagagccatgtcacatttttctcttctatgtacagcgttttaacttactgacaca

SEQ ID NO: 375 - DNA, 410 bp, Homo sapiens
tttcacttaggtccactttttatttattttatttttattcatttatttttttgagatggagtttcgctgtgtcacccaggctggagtgcagtggtgtgatcttggctcactgcaacctctgcctcctgggttcaagcagttctctgcctcagcctcccgagtagctgggattacaggtgtgcgccaccacacctggttaatttttgtatttttagtagagacggggtttcaccatcttgggcaggctggtcttgaactcctgacctcgtgatccacccgctttggcctcccaaagtgctgggattatagccgtgagccaccgcgcctggcctatttatttatttacttatttatatatatattgtaagacagagtcttgctgtgtcaccaggctggagtgcagtggcaca

SEQ ID NO: 376 - DNA, 796 bp, Homo sapiens
ggctgcacctgaagcatttggtgggtgagcagcatgggctttgaggagctgctggagcaggtgggcggctttgggcccttccaactgcggaatgtggcactgctggccctgccccgagtgctgctaccactgcacttcctcctgcccatcttcctggctgccgtgcctgcccaccgatgtgccctgccgggtgcccctgccaacttcagccatcaggatgtgtggctggaggcccatcttccccgggagcctgatggcacgctcagctcctgcctccgctttgcctatccccaggctctccccaacaccacgttgggggaagaaaggcagagccgtggggagctggaggatgaacctgccacagtgccctgctctcagggctgggagtacgaccactcagaattctcctctaccattgcaactgaggtacttaagcccagaagttgagagacatgtgagagggatgggcctgccattgccttgggtggttactgtgtaggcattagatgtattactttacctcttaaagtctcagtttaccaatctgtagatgggggctatgaatataaggcacttttagttcatggcttgtagtaacaggatcctacacaagaactgttatcatcatcattaattgggaggtgattaaggcagggaagggctaaagtggcttcagggagttgagacaaagagctgagaaggcaatttctgcagcaagaggtggagaaacaatagaggccttcttttctcccttcctcttttccagtcccaggtcggtatttacataatccatctg

SEQ ID NO: 377 - DNA, 864 bp, Homo sapiens
atttttgagataaggtcttgctctgtcgctggagtacagtggcacaatcacagctcactgaagcctcaacctcccaggctcaagtggttctcctgcattagcctcctgagtagctgggactacaggcgtgtgccaccacacccagctaatatttattttttgattttttgtagagacagggtcttgccatgatgcccaggctgatcttgaactcctgggctcaaacccaccctcccgccttgacctccaaaagtgtttggattacaggcatgggccattgcacccagcccagaggtggcttttaaactgggcattaaaagatgaataagagctcatcaagtgtggagggcttggggaggagatgatgttccaggctaaggggactacatgagcaagagcctggaagttgagagcctgtagtatgtccaggaacatgtggcttagggtcatgactttctggctgatggaccttctgcctattcctaggtgggtgcctgagtctgcacgctggcttctgacccaaggccatgtgaaagaggcccacaggtacttgctccactgtgccaggctcaatgggcggccagtgtgtgaggacagcttcagccaggaggtgagggtgaacgtgtgtgtgagcatgcatatctgtgtgtggtggggagtgggctgtgtcaagtgcctccctcccagagcccaccatatatggcaggaaaagcccctgggcccccacagagagttccgaactctttaggatgtcctacctggctccagtgggccacatccatcattcgagacaaactcgtctcagctgccatgagcatctccatccccaccactgcagatgggaggaatagagaggggtggggg

SEQ ID NO: 378 - DNA, 329 bp, Homo sapiens
ccatctcctttcccatatggttttgcattgcctctaaacttttacgttttcatttacatagcttacctagatgatggcatgaccctgtggataagagtctgggtctcagagtgagattgcctgggtttgtatctgagttcttttacttatcatctctgggcctccgtatttgcattatacatgggaactaataaaaatatctatctcataagataaggattcagtgagacaatccaggtaaatcacttaacctagagcccagttcgtggtaagtgcttggtagaatgcaccgttattgttgttgtcttcttcgtcatcatcatcatcat

SEQ ID NO: 379 - DNA, 289 bp, Homo sapiens
agggtatctgaatgaggggaaaatgtttgggaaaatgtttggaaaaagctgttccatgcagggcagccctatgtgcattggcttggagatgtgaatggctcaggctgagggaatgggcaggtggagggaatgtggctaagggtaggcatgtgaggctaagatatctgtggggccacaatggcgagcagatcaggctggatagtacttgagcattagattgtggaaggcctgcggaccatgcttaggagtcaggactctattctgtatccagcagagatttccttttatg

SEQ ID NO: 380 - DNA, 356 bp, Homo sapiens
atggagaaaaatttcaaattctggtataaacaaataatctaaaaatatagataaggaaaaaatgttttcatttttttggtcatattgatttgggtcatatatgattgaccaaaaaaaaagatatttctaaaatcctggtgctttttcatttaaaaatagacaaccaaagaggaaaatgaacaatgatggaaattcgtggaagaggaaactaaaatggcaaaatagcatattaaatggcactgagccttggtgtgatcaaaaaaaaaaataaagcaaaatgagatattactgcttacctattagcttatgctgttggtagaaataaatgtgcattgtcataggtttctgacaaacaa

SEQ ID NO: 381 - DNA, 356 bp, Homo sapiens
atggagaaaaatttcaaattctggtacaaacaaatattctaaaaatatagataaggaaaaaatgttttcatttttttggtcatattgatttgggtcatatatgattgaccaaaaaaaaagatatttctaaaatcctggtgctttttcatttaaaaatagacaaccaaagaggaaaatgaacaatgatggaaattcgtggaagaggaaactaaaatggcaaaatagcatattaaatggcactgagccttggtgtgatcaaaaaaaaaaataaagcaaaatgagatattactgcttacctattagcttatgctgttggtagaaataaatgtgcattgtcataggtttctgacaaacaa

SEQ ID NO: 382 - DNA, 484 bp, Homo sapiens
gcagggtcatcaaatcctgctagtgacacagaagctgacatccagctcccacccgccttcctcccaggttcggggagcaggtagagtgggagccattaggtgggctctgccagtgttgtcatagagtggcaagtcctccatgggatgggagtggcatgtgggagccttctgcatcatgcactatgaaaaaagaaaatttactatggggcaagtggttcatatagttaagtgattgtatatatatatatatatatatatatatatatatatatatatatatatacactatggggcaagtggttcatatagttaagtgattgtatatatatatatatatatatatgtattccagtgtagaaagtattggctgggtctgtaatcaagtattccacagaagtgccttcataggtgctgaaacaggattatgagagtgacagacacaggactgaagacagggagaaaatgtgcatggctgtgagaatat

SEQ ID NO: 383 - DNA, 301 bp, Homo sapiens
attttttttttttttttttttgagacggagtctcgctgtcgcccaggctggagagcagtggcgcgatttcggctcactgcaggctccgccccccggggttcacgccattctcctgcctcagcctcccgagtagctgggactacaggcgcccgccacctcaccctgctaattttttgtatttttagtagagacggggtttcacagtattagccaggatggtctcgatctcctgacctcgtgatccgctcgcctcggcctccgaaagtgctgggattacaagcgtgagccaccgcgcccggcc

SEQ ID NO: 384 - DNA, 1482 bp, Homo sapiens
attttttttttttttttttttgagacggagtctcgctgtcgcccaggctggagagcagtggcgcgatttcggctcactgcaggctccgccccccggggttcacgccattctcctgcctcagcctcccgagtagctgggactacaggcgcccgccacctcaccctgctaattttttgtatttttagtagagacggggtttcacagtattagccaggatggtctcgatctcctgacctcgtgatccgctcgcctcggcctccgaaagtgctgggattacaagcgtgagccaccgcgcccggccttgaatgggaatcttattaaaaaaaaaaaaataggggactgggcattgtggctcatacctgtaaccccggtgctttgggaggccgaggcaggtggatcacttgagctcaggagttccagactagcctggacaacatggcaaaaacctgtctttacaaaaaaacacaaaaattagccaggcatagtggcatgcaactgtattcccagctacttgggaggctgaggtgggaggatcgctggagcccaggaggcacaggttgcagtgagccatgatggcaccattgcactccagcttgggcaacaaagcaagtcctcatttcaaaaaaaaaattttatctaaaaatctggagaaattaatatgaagcatcagaaagtataaaaagcaaggtacagaataatgtgtattacatgatccaatttttgtgaaagaaaaaacaaaacaaattaaaattcctatttattagtatataggttcatatgagcatggagaaagacatagaaatgtataaaacaggctgttcccctcagaaacctggatctgaaaagagttgaaaaactaaagttaacttttgagccataactgttttgaactaatattatgtaatttctttacatactatttttgaaagtcttgaatagaggcaggacaatgaactttaacaatttcttcaagaatgtcaatcgcattctttaatcatttgtaggagcttgacatcaatattgtcagttatgatgagatttatgactttattacttttttacctcataaagaaacagtaatgaaagattctagctgccaacatgtatatgtaattgtgaactaatttaaaggtactgtaattgagattttaatcacttaaaaaaaaaaactgaccacataaaggtcaaaataatataaactatcacagccacctctaaagccttgggatgatattactcatagagtcatagaaatgtttttcttacggtgaaaccccgtctctactaaaaatacaaaaaattagccgggcgtagtggcgggcgcctgtagtcccagctacttgggtggctgaggcaggagaatggcgtgaacccgggaggcggagcttgcagtgagccgagatcccgccactgcactccagcctgggcgacagagcgagactccgtctcaaaaaaaaaaaaaaaaaaaaaaagaaatgtttt

SEQ ID NO: 385 - DNA, 397 bp, Homo sapiens
gcagggtcatcaaatcctgctagtgacacagaagctgacatccagctcccacccgccttcctcccaggttcggggagcaggtagagtgggagccattaggtgggctctgccagtgttgtcatagagtggcaagtcctccatgggatgggagtggcatgtgggagccttctgcatcatgcactatgaaaaaagaaaatttactatggggcaagtggttcatatagttaagtgattgtatatatatatatatatatatgtattccagtgtagaaagtattggctgggtctgtaatcaagtattccacagaagtgccttcataggtgctgaaacaggattatgagagtgacagacacaggactgaagacagggagaaaatgtgcatggctgtgagaatat

SEQ ID NO: 386 - DNA, 641 bp, Homo sapiens
tgggagttggtctgggaattttcttagtggcagaaagtcactttggcctcttaggtttgctagagaacaagtttaaagtggatagttcaagctattttccaggagagaagggcttgctgtataccatttcacagagctggtgtgtgagcccccacactaatctgaaagctctaaagggcgtccttgtgtctctgtccaccccaggatgcctgatgaacacacagggcccaatgaatgaaggtacattcagaatctgttcaacaccttgctctttccagggcagtgtgaatccttcctataacatatggcaaatcttgctacaccatcgagggaaacttttgaatgcccattaactctttcgcatatttagaatttcattgacaaatgaactgctctggggaactgaacaatctctttgcagtaggaaggtgttggtgtgcattgtgaaatgtctaatgttgctgtagaaaaatcttgcatcacttaggagcatcagattcagcatttttcaggtatgttgtagtgagttaagttgtagtgataagcccaggatctgttcaacctagaaatactggttagtatgaggtcagctctggggccaaagagaaaagtcatgtgcaagtgaggttagaaaacatctc

SEQ ID NO: 387 - DNA, 641 bp, Homo sapiens; identical to SEQ ID NO: 386

SEQ ID NO: 388 - DNA, 460 bp, Homo sapiens
aaactatggagacagtataaagataagtggttgtcagagtttggtggcagggagggggcaagtgatgaatatggtggagcacagagaatttttaggcagggaaaatatgtagtggtagatacatgtcattatacagttgtccaaacccgtagaatgtacaacaccaagaaagaagtctaatgtaaactgtagactttgaatgagtataatgcatgaatgtaggttcatgtattgcaacaaacatatcactttggtggggggtgttgataataggggagtaggtaatgcatgtgtaggaacagtgagtatatgggaaatctctgtgccttcctcttaatttggctgtgaacctaaaaactgctctaaaaaaataaaatttttaatttagaaaaaattaaatagaaaaaaggaataattaaggttagaatggcaatcagtaaaataaaaaaaaaaagaaaag

SEQ ID NO: 389 - DNA, 593 bp, Homo sapiens
atagagagcccagaaataaatccacataaatatagtcacccaatctttgacagaggaacaaagatagagcagagatagtattttcaacaaatgtcactggaacaactgaacatctcataagaaaaaaatgaatctagacacagatcttacacccttcagaaaaattagaatggtttatagacttgaatgtaaaacacaaaatgcaaaactcctggaagacaatataggagaaaacctagatggccttgggtatgtcaatgactttttagatataacaccaaagtcatgatccgtgaagtaataattgataagctggacttcactgaaattaaaaacttctgctctgcaaaagacaataacaagagaaagaaaagtttttttggcaaaaatatatttgtaaaagatgcatctgataaaggagtgttatccaaaaaaatgcaaagaactctaaagactcaacaatcagaaaacaaaccaaatttagaaatggatcaaagaccttaacagacacctcaccaaagaacatatacagatgacatataagcatatgagcagatgctccacatcatatatcatcagggatacacaaatta

SEQ ID NO: 390 - DNA, 1226 bp, Homo sapiens
gaggctggactgtactgccgccatcttggctcactgcaacttccctgcgtgattctcctgcctcagcctgccgagtgcctgggattgcaggcgcgcgctgccacgcctgactggttttcatatttttttggtggagacggggtttcgccgtgtcggccaggctggtctccagctcctaaccgtgagtgatctgccagccttggcctcccgaggtgccgggattgcacacggagtctcgttcactcagtgctcaatgttgcccaggctggagtgcagtggcgtgatctcggctccctacaacctccacctcccagccgcctgccttgccctcccaaagtgccgagattgcagcctctgcctggccgccaccccgtctaggaagtgaggagcgtctctgcctggccgcccatcatctgggatgtgaggagcccctctgcccggctgcccagtctgggaagtgaggagtccctctccccggccctcatcccgtctaggaagtgaggagcgtctctgcccggccgcccatcatctgggatgtggggagcgcctttgccccgccaccccgccaccccgtctgagatgtgaagagcgcctctgcccggccgcgaccccgtctgggaactgaggagtgtctctgccccgccgccaccctgtctgggaagtgaggagcgtctctgaccagccgccaccctgtctgggaggtgtacccaacagctcattgagaacgggccatgatgacgatggcggttttgtcgaatagaaaagggggaaatgtggggaaaagaaagagagatcagattgttactgtgtctgtgtagaaagaagtagacataggagactccattttgttctgtactaagaaaaattcttctgccttgggatgctgttaatctataaccttacccccaaccccgtgctctctgaaacatgtgctttgtccactaagggttaaatggattaagggcggtgcaagatgtgctttgttaaacagatgcttgaaggcagcatactcattaagagtcatcaccactccctaatctcaagtacccagggacacaaacactgcggaaggcggcagggccctctgcctaggaaaaccagagacctttgttcacaagtttatctgctgaccttccctccactattgtcctatgaccccgccaaatcccgctctccgagaaacacccaagaatgatcaataaatactaaaaaaatttaaaagaaag

SEQ ID NO: 391 - DNA, 1113 bp, Homo sapiens
atttggagaagataataaagcactggttctcttttattgttaagatctcagctgatgtgggaacattgtgattgcactataaattgctaaagtgaagaagagaacaaataacttcatttatttattttgtttgttttttagacagagtctcgctctgtcacccaggttggagtgcagtggcacgatttcggctcacttcaacctccccctcccgggttcaagggattctcgtgcctcactcagcctcctgagtagctgggattacaggcgcccgccatcatacctggctaatttttgtatttttagtagagacggggtttcaccatgttggccaggctggtcttgaactcctgatctcaagtgatacactttgcctcagcctcccaaagtgttgggattacaggcgtgagccaccacacctggtcatctttatctttttgacatgttcatcctcgtccccacactaaggtagagataaagcaattatcttctcaatgcttgaaacattttaagttgaattcattctatgattttctttagatttctccgcatatatcaatggaaaaaattaactatcttaatttctcatctatatagaaatgccagtgcaacaaaaccaaatgtagggttagaatatcagcaaggcaaagagagaagagaaaattcccagattatgaaatggagaagaagaacagaaacatgatatttagctcacaactctttcaacccattttctatacactccattattctttcttagaattcttacacaaatatttagtacaattttggaggaatagtagaaacattttatagtttttccttgtcctgtatcttcatctagccttcttttcagctttcctatgtcctttgttctccttttataaggagagatgagttgtacaataacatccattttcataagttatttaggtaaattattttgaagtatacatgttggatttccaaagcagctgtttttaattaaaatttaattaactaatttatgtcattatatatcttgtgttaagacaaccttaactttcttttagtaagattttacccaactgtttaccctaattatagacaattaaaatgttctctcttaaaaaa

SEQ ID NO: 392 - DNA, 1113 bp, Homo sapiens; identical to SEQ ID NO: 391

SEQ ID NO: 393 - DNA, 849 bp, Homo sapiens
aaataaaatataatacattacctatgtatcaaaaagcatgtgtaagaaagccaaatatgttaactgttctactttatttatgtaattatattttcattagtattttagtagatggggctgtatagaaaaacaaatgtatcatatgtagccaaatgaatctttttcttaaatgatattattatagtaggctacagtaatttcaacaattttacaatagagttttgatcctcttctttgcgatttgtttcaggagacacctcatgaatcacacaagaaaattagtctcagtacttatagccctatttcatttttcaattcagttttatcacaccatggcttcgaagtgactttgattgtgacccctaaagcaattatctgattaggggataaaaattcataattccaagatgtttctgaaaatgttctgaacaatgacaacatatttggaatgagggcgtaatttcactaagtgatgcttcgaagaacaatattcatttggatatgcaaacacacattttcaaaagttatattactgtgttaccatacctgttataaaataataaaaatatataagtatttattaagtcaaacttcagctactgcctgaaagtttagcatatgaaatttaaattaagtctttcagattatgattatgacaattgttcaacattttgtccttccttataactgagaaagcataacttaatataactactaagagaggcccattcattcttccagtgattctagaagaaatatggcacataatatcctttacttctaaataaaggagtcaatgactcagaaaataaagaggaaaaataaagtaaatgtgagagagatgaagaa

SEQ ID NO: 394 - DNA, 128 bp, Homo sapiens
gggcacagtggctcacacctgtaatcccagcactttgagaggccgaggtgggtggatcatgaggtcaggagatcgagaccattctggctaagatggtgaaaccctgtctctactaaaaatacaaaaaa

SEQ ID NO: 395 - DNA, 115 bp, Homo sapiens
gggcacagtggctcacacctgtaatcccagcactttgagaggccgaggtgggtggatcatgaggtcaggagatcgagaccattctggctaagatggtgaaaccctgtctctacta

SEQ ID NO: 396 - DNA, 847 bp, Homo sapiens
aaataaaatataatacattacctatgtatcaaaaagcatgtgtaagaaagccaaatatgttaactgttctactttatttatgtaattatattttcattagtattttagtagatggggctgtatagaaaaacaaatgtatcatatgtagccaaatgaatctttttcttaaatgatattattatagtaggctacagtaatttcaacaattttacaatagagttttgatcctcttctttgcgatttgtttcagagacacctcatgaatcacacaagaaaattagtctcagtacttatagccctatttcatttttcaattcagttttatcacaccatggcttcgaagtgactttgattgtgacccctaagcaattatctgattaggggataaaaattcataattccaagatgtttctgaaaatgttctgaacaatgacaacatatttggaatgagggcgtaatttcactaagtgatgcttcgaagaacaatattcatttggatatgcaaacacacattttcaaaagttatattactgtgttaccatacctgttataaaataataaaaatatataagtatttattaagtcaaacttcagctactgcctgaaagtttagcatatgaaatttaaattaagtctttcagattatgattatgacaattgttcaacattttgtccttccttataactgagaaagcataacttaatataactactaagagaggcccattcattcttccagtgattctagaagaaatatggcacataatatcctttacttctaaataaaggagtcaatgactcagaaaataaagaggaaaaataaagtaaatgtgagagagatgaagaa

SEQ ID NO: 397 - DNA, 7470 bp, Homo sapiens
gaagactctacatgtccgaatggaaaagcatttcaaaaacggaatggcagttgcccagttcctggaatctaatccttgggtagaaaaggttatttatcctggtatgttaatttgatttctaagcagatctactaggatttcagcagttatcctgagcatcgtgtttatgtaacatttatttgtaagttaggtgctttcacgtattgtttttgttcatttattattgagcactgccatgtgtcaggctctgtggtgggtcaggtggaaagaagatagacctggtctctactgttgtattgcctctagtttagtggatgcttggatagtagaaaatcagttttatgcattagttgttcctgtggtggtctgtgatttgaaggcttgtgtatacctattcaaagattttaacattagacttttcagttgatttgcttataatcttgtctgtctgctattcagcattagctgtcactttaatctgatagaggtttgtcccagttgagacttgatattaggtgctaaaattcccctgaggttctctctctctcttttttttttttttttttttgagacggagtttcactcttgcccaggctggagtgcaatgatgcaatttcagctcactgcaacctctgcctcccgggttcaagtgattctcttgcctcagcctcccgagtagctgggattacaggtgcccgccaccacgcccagctattttttgtatttttagtaaagacggggtttcaccatgttggccagtctggtctcgaactcctgacctcaggtgatctgcctgccttggcctctcaaagtgctgggattacaggcatgagccactacgcccagccccctgaggttctctcctgtatttctctcctgtatttttattccttcacctcttccagcatctagaaagtcttctgtggagttggctgacttacatcttactttttgaatttatttttaccagtcttttaagctgtggtggtcctaagtagttcttttctttttagatccttttgagggttctagcatctagaatatatagaaaaattaagactggaatttcactaggaaattcacaaggaatttagagaaaccaaagcgaaatacatatgaaactaaatgccctaaaggtactttaggtaaagagctgttgattgatatatattttggatggagggagagagaagagttttgagctatgccatgaagaatgggcagcattggttaaaagggcatagacaaggtattggagatttattcaagaaatttttattaaacgccagctatgagccaggctttgcactaggaactgggatccaattagtaacaaaagaaatggatttgccctcatggagcaactctggtggctaagacagatactaagcaagaaattacaggatataattaacaagggaagtccaggttgaagggacagcatgtgcaaaggtcctgagatgaaagggagtgcagtggtgctggcataaagaaagctgaagagggtagaaaagatgaggcaacatgaagctggagagataggggcccaagcaagtagtcagatgtgagcatggcataatcctcgtcttaggcttatttgcagttaagtagacagtgaaaaataccaccctccccccccaaaaattacatgtttaattctaaaataagacttatgataccttatgattacagggctgccctctcatccacagcatgagttggtgaagcgtcagtgtacaggttgtacagggatggtcaccttttatattaagggcactcttcagcatgctgagattttcctcaagaacctaaaggtaaacttacaaaataggtttaaaattgtaggaggtaaggccttacagcagttcactatctctcacttctactcaagccagataatgtttttgtatctgcaggttacactcataaacctcttttcatgaaatgcattggggttgaaaacaacttaaacaacaatgtagcagacatctaaatatgttcacttacttaactctccacatactacaatcagtttggagacacagagtattctaatgcatttatttaaaagtgaaccccttttttcagatgaaataggtaaaacctcgaagtagtgtgcagttagtgcactgcacaagggctgttctaaaatccatcctgtgaatggctttccaaaccctgtgcctcctaagctgcatctgactggggtgaggcctttgtctaattttcaaaaagccaggaggaggctctcaggggccttgagcaagaggcctgtccaactccatacactgggcttaaccttgagctcatgcagtttatatactacagaatagattaacagaaagctgccagattagtcaaagtgttcctggtgtcaccttaatttaatacatttaccaaagtaacttttaaaacatttgtaaagttttatgacactatcacactcaacataaaaacagtggttttttttttttcccctattccagcagggatttaaaggatgtatttcataagtgatatatattaacaaggaagtatgtataacttgggaagcatttagagatttttttatttaagtggtaaccacagagcaaagtctcaaatgcaataatttttttttttttttttttttttttaggcagagtttcactcttttgcccagactggagttcagtggcatgatctcggctcactgcaacctccacctcctgggttgaagtgatactcctgcttcagccttccaggtagctgggattacaggtgcgtgccaccatgctcagctaatttttgtatttttagtagagacggggtttcactagttggccaggctggtctcgaactcctgacctcggtgatccgcctgacttggcctcccaaagtgctgggattacaggcatgagccactgtgcctggcctaaaaacatttatttttagattttagtatttttattttactagaaaatctaaattcatgttttctttgctatagctatttactctggccgagagcttgggaggattcgaaagccttgctgagcttccgtaagtatagttctgtttttctcagtattttaaatttgatgtcagctttaatgattgggaaagaaatatgataaggtcagggataattcaagatatttaacaataagaatagcaggacattaatcagaatggactctaaccctgtcaagatggagaccctgataaaatctcatggagggcttcttgttagtgagcggtgtcctcccaaatgttgcttccttccctgctctgtcaaaaagagattccagcagtaactgtattctaggatctctgatctctgacctctaagcaagggccacatgttctaccctactcagccttagaggggattggagactttgtactagaaaagctgttttcaaggctctttgggaaacagaaaatgtgtctctgatgaaactcctccatgcccttgattgttggagaacagccctactagatactgtcaaatcttttgttttctgttctctgtaggataaacctttaatgtcttcatgttgtgtacaagataaatccaaaccctaacttggtaccaggcccttcagtatctaacccaatcaattcatctagttttttcaaagcatcagaggatattggtacaagaagcagtctaagatcatacagtccagcagcttattttacaggcaaggaaacaaagatccagaaagttgagctgattgactcaagtgtcacacaggaacgtgttcgcagcttcactcttggatttgcatcagaaacagtgaggggaggtaaaaggtgcttggatctagatttgagatctgcttccaccaattagttaacctttaaacttccattttttaacacataaaatgagattaataattaatgattttcggcctggtgcaatggctgacgcctgcaattccagtactttgggaggccgaggtgggccacttgaggtcaggagttcaagaccagcctggccaacatggtgaaaccctgtctctcctaaaaaaaaaaaaaattatccgggtgtggtggtgtacacctataatcccagttacttgggtggctaaggcacgagaatcgcttgaacccaagtgatggaggttgcagtgagccgaggttgcagcaagccaagatcgcaccactgcactccagcctgggtgatgcagcgagactctgtctcaaaaaagaaccaaaacaacaacaaaaaattaatgattatcatttattgattacctgtccccccaagcattcctgatatatatattacctttattatatgctactatgaccatatgttgtaattactgcagggttaagtcaacatcataacctaactatttttaactgtactaaatgtatacggtgtatttctgtgtcttcatttttataaacatttatggaataacttgttttgcaagcattgtgtggagaaatgtcaggtcccaccaaagtttaggcctattttctgtctttgtataggagtttacagttagaccaaaagtcaggcagtctcaccaagttaaaaaaaaaaaaaagatgtctaaataatgacttgaaataattcatgtaacgcagatttttgttagtctttccggaagatgcctgctagtaagtttggatgcacaagagggcacactcagcatgtgaaatgggtttgtttttcacagtaatgaaatgtgtattacgttaagactctcttgtttaaaaaattgtcttaaaataaatctctcctgatttatttagggatttttgtttaaagttgcttggcccccagacactctggtttaggctataaccccgatgccagaggatgagtggatttaggtcagggcttgtctgttctatcacccttcattctgtgtctcccaactctgctgctactagtgcagcattgcaatatgggaggaaggaagtgaagctaatgtgtattagcttagtctcccagcctcacaacacatgtaactctgtgaccttagaaaagttactcatcctccctaaatctcaatttcctcaattttaaaatgtggacaacactctacatagctcttaggtttgttgcgagaacatggggaaaaaaatccctaagctaatgccttcgttcatactaagtacccaataaacgttagcacctactatgaactattatcttttattagacatctctactacattccaagtgcttagaagtgctttatacatgttccttcaaattaatgtctgtgacaaacctttaagacaggtgttatatccaatttttattcattaaaaaaatgaattaatgcacacaaaccacctagtagagtatctgtctcatggtaagcacacagtagatgcatctattattatttcagataaggaaataggcactgaggatgagtaacttttataaggccacataggcagtatgtggaagggctaagattcatacccaagtttgttggtctctgagacctgagttcttatttctacatgtacacactcttttaaggaattacgagtctcccagggcagaacattttaagatggatgtttgtatctaaacaacactttagtaaagtgacaaaggaagatatccatcactcagaccacagctgagatttttttttccccatggctctcatgtaagagaggagaaagcagcttaggtattgattttgctggtggtgtgcagggaaaggaagagtgttggttgtaatacacatactggggttaagtaagatgctaaacctctcctccattattcttcacagaaatttctccttccctggaacttggcagtctttttgtctatacttgtttggcattgtttatatagactattttgttttgtgaattgtcatcgcttttacctcctgctttgttatttaggttaaagaaaatatctcattcttcttggtttcccaatttttactgcagtgcttgacatattatgggtggttttcctttacatctgttgatgatggtaatgggctgctagatcgtttgaaaaatccttccaggcctctatgccaggagttatattgtggaattctgaatgcttactggttgctactagtgattcttggtcatctttctccgatgtgcctcagaaggtctagctctggattgatccagaggaaactaattatgacaggctcttggtccaagagacctcttataagtagcaatccagtaggttggtcatggagtacatgatttctggccaaacttcatttaggcaggtattaaaatatacacgttggggaggctatgccttaccctactgcatgggggtacttgacacacactttcagtatttggattgagcatatcttaccaatggtataaacaggataaaaacaatcttgcttttcatttaaaatcatagctagaagagataagtttcgtaattttctctttttttgcctgtgaattataggggtatgcaaaatttgatatttggaccagaaaaatgttgagggtaattgcagtttatgagacagaaacatgcctccactgacacaatatagtgatcaaaaatttgctcatgtcttctttcagggcaatcatgactcatgcatcagttcttaagaatgacagagatgtccttggaattagtgacacactgattcgactttctgtgggcttagaggatgaggaagacctactggaagatctagatcaagctttgaaggcagcagtaagtcttattattgtgtgtgtgtgtgtgtgtgtgtgtgtgtgtgtgtctgctttatcttgggcatggggggtcactatatttacaaagtgtggtctcactgtgaactctaaagcttttctgttcctgtaatagaccaggtgtataaataaacgtatagggagctcagtcaaagtgcatatttaaaggatggtagtattcagaaaaaggacttcttgaggagttgaagctatggcctatatgtttaataacatatttttcttgtgcactgttattatagcaccctccaagtggaagtcacagctagtattccagagctgctattagaagctgcttcctgtgaagatcaaatcttcctgagtaattaaatggaccaacaatgagcctttgcaaaattttcaagcggaaattttaaggcacctcattatctttcataactgtaattttcttagggatcatctctgttaaaaagttttctgtatgtcatgttataattacaggtcaattctgttaatatctttttgttaattttgctctatgtttgcctctgaaggaggtgagatttgtgctactttgggagattatgttcttttttcatgtctaagatttattttgatcatgtttataatataatggtaattcatttttgatgttttgtgaagaatttaaatttaaacgaatgttcttaaatcaagtgtgatttttttgcatatcattgaaaagaacattaaaagcaatggtttacacttagttaccataagccgaaaatcaaatacttg

SEQ ID NO: 398 - DNA, 7470 bp, Homo sapiens
gaagactctacatgtccgaatggaaaagcatttcaaaaacggaatggcagttgcccagttcctggaatctaatccttgggtagaaaaggttatttatcctggtatgttaatttgatttctaagcagatctactaggatttcagcagttatcctgagcatcgtgtttatgtaacatttatttgtaagttaggtgctttcacgtattgtttttgttcatttattattgagcactgccatgtgtcaggctctgtggtgggtcaggtggaaagaagatagacctggtctctactgttgtattgcctctagtttagtggatgcttggatagtagaaaatcagttttatgcattagttgttcctgtggtggtctgtgatttgaaggcttgtgtatacctattcaaagattttaacattagacttttcagttgatttgcttataatcttgtctgtctgctattcagcattagctgtcactttaatctgatagaggtttgtcccagttgagacttgatattaggtgctaaaattcccctgaggttctctctctctcttttttttttttttttttttgagacggagtttcactcttgcccaggctggagtgcaatgatgcaatttcagctcactgcaacctctgcctcccgggttcaagtgattctcttgcctcagcctcccgagtagctgggattacaggtgcccgccaccacgcccagctattttttgtatttttagtaaagacggggtttcaccatgttggccagtctggtctcgaactcctgacctcaggtgatctgcctgccttggcctctcaaagtgctgggattacaggcatgagccactacgcccagccccctgaggttctctcctgtatttctctcctgtatttttattccttcacctcttccagcatctagaaagtcttctgtggagttggctgacttacatcttactttttgaatttatttttaccagtcttttaagctgtggtggtcctaagtagttcttttctttttagatccttttgagggttctagcatctagaatatatagaaaaattaagactggaatttcactaggaaattcacaaggaatttagagaaaccaaagcgaaatacatatgaaactaaatgccctaaaggtactttaggtaaagagctgttgattgatatatattttggatggagggagagagaagagttttgagctatgccatgaagaatgggcagcattggttaaaagggcatagacaaggtattggagatttattcaagaaatttttattaaacgccagctatgagccaggctttgcactaggaactgggatccaattagtaacaaaagaaatggatttgccctcatggagcaactctggtggctaagacagatactaagcaagaaattacaggatataattaacaagggaagtccaggttgaagggacagcatgtgcaaaggtcctgagatgaaagggagtgcagtggtgctggcataaagaaagctgaagagggtagaaaagatgaggcaacatgaagctggagagataggggcccaagcaagtagtcagatgtgagcatggcataatcctcgtcttaggcttatttgcagttaagtagacagtgaaaaataccaccctccccccccaaaaattacatgtttaattctaaaataagacttatgataccttatgattacagggctgccctctcatccacagcatgagttggtgaagcgtcagtgtacaggttgtacagggatggtcaccttttatattaagggcactcttcagcatgctgagattttcctcaagaacctaaaggtaaacttacaaaataggtttaaaattgtaggaggtaaggccttacagcagttcactatctctcacttctactcaagccagataatgtttttgtatctgcaggttacactcataaacctctttatcatgaaatgcattgggttgaaaacaacttaaacaacaatgtagcagacatctaaatatgttcacttacttaactctccacatactacaatcagtttggagacacagagtattctaatgcatttatttaaaagtgaaccccttttttcagatgaaataggtaaaacctcgaagtagtgtgcagttagtgcactgcacaagggctgttctaaaatccatcctgtgaatggctttccaaaccctgtgcctcctaagctgcatctgactggggtgaggcctttgtctaattttcaaaaagccaggaggaggctctcaggggccttgagcaagaggcctgtccaactccatacactgggcttaaccttgagctcatgcagtttatatactacagaatagattaacagaaagctgccagattagtcaaagtgttcctggtgtcaccttaatttaatacatttaccaaagtaacttttaaaacatttgtaaagttttatgacactatcacactcaacataaaaacagtggttttttttttttcccctattccagcagggatttaaaggatgtatttcataagtgatatatattaacaaggaagtatgtataacttgggaagcatttagagatttttttatttaagtggtaaccacagagcaaagtctcaaatgcaataatttttttttttttttttttttttttaggcagagtttcactcttttgcccagactggagttcagtggcatgatctcggctcactgcaacctccacctcctgggttgaagtgatactcctgcttcagccttccaggtagctgggattacaggtgcgtgccaccatgctcagctaatttttgtatttttagtagagacggggtttcactagttggccaggctggtctcgaactcctgacctcggtgatccgcctgacttggcctcccaaagtgctgggattacaggcatgagccactgtgcctggcctaaaaacatttatttttagattttagtatttttattttactagaaaatctaaattcatgttttctttgctatagctatttactctggccgagagcttgggaggattcgaaagccttgctgagcttccgtaagtatagttctgtttttctcagtattttaaatttgatgtcagctttaatgattgggaaagaaatatgataaggtcagggataattcaagatatttaacaataagaatagcaggacattaatcagaatggactctaaccctgtcaagatggagaccctgataaaatctcatggagggcttcttgttagtgagcggtgtcctcccaaatgttgcttccttccctgctctgtcaaaaagagattccagcagtaactgtattctaggatctctgatctctgacctctaagcaagggccacatgttctaccctactcagccttagaggggattggagactttgtactagaaaagctgttttcaaggctctttgggaaacagaaaatgtgtctctgatgaaactcctccatgcccttgattgttggagaacagccctactagatactgtcaaatcttttgttttctgttctctgtaggataaacctttaatgtcttcatgttgtgtacaagataaatccaaaccctaacttggtaccaggcccttcagtatctaacccaatcaattcatctagttttttcaaagcatcagaggatattggtacaagaagcagtctaagatcatacagtccagcagcttattttacaggcaaggaaacaaagatccagaaagttgagctgattgactcaagtgtcacacaggaacgtgttcgcagcttcactcttggatttgcatcagaaacagtgaggggaggtaaaaggtgcttggatctagatttgagatctgcttccaccaattagttaacctttaaacttccattttttaacacataaaatgagattaataattaatgattttcggcctggtgcaatggctgacgcctgcaattccagtactttgggaggccgaggtgggccacttgaggtcaggagttcaagaccagcctggccaacatggtgaaaccctgtctctcctaaaaaaaaaaaaaattatccgggtgtggtggtgtacacctataatcccagttacttgggtggctaaggcacgagaatcgcttgaacccaagtgatggaggttgcagtgagccgaggttgcagcaagccaagatcgcaccactgcactccagcctgggtgatgcagcgagactctgtctcaaaaaagaaccaaaacaacaacaaaaaattaatgattatcatttattgattacctgtccccccaagcattcctgatatatatattacctttattatatgctactatgaccatatgttgtaattactgcagggttaagtcaacatcataacctaactatttttaactgtactaaatgtatacggtgtatttctgtgtcttcatttttataaacatttatggaataacttgttttgcaagcattgtgtggagaaatgtcaggtcccaccaaagtttaggcctattttctgtctttgtataggagtttacagttagaccaaaagtcaggcagtctcaccaagttaaaaaaaaaaaaaagatgtctaaataatgacttgaaataattcatgtaacgcagatttttgttagtctttccggaagatgcctgctagtaagtttggatgcacaagagggcacactcagcatgtgaaatgggtttgtttttcacagtaatgaaatgtgtattacgttaagactctcttgtttaaaaaattgtcttaaaataaatctctcctgatttatttagggatttttgtttaaagttgcttggcccccagacactctggtttaggctataaccccgatgccagaggatgagtggatttaggtcagggcttgtctgttctatcacccttcattctgtgtctcccaactctgctgctactagtgcagcattgcaatatgggaggaaggaagtgaagctaatgtgtattagcttagtctcccagcctcacaacacatgtaactctgtgaccttagaaaagttactcatcctccctaaatctcaatttcctcaattttaaaatgtggacaacactctacatagctcttaggtttgttgcgagaacatggggaaaaaaatccctaagctaatgccttcgttcatactaagtacccaataaacgttagcacctactatgaactattatcttttattagacatctctactacattccaagtgcttagaagtgctttatacatgttccttcaaattaatgtctgtgacaaacctttaagacaggtgttatatccaatttttattcattaaaaaaatgaattaatgcacacaaaccacctagtagagtatctgtctcatggtaagcacacagtagatgcatctattattatttcagataaggaaataggcactgaggatgagtaacttttataaggccacataggcagtatgtggaagggctaagattcatacccaagtttgttggtctctgagacctgagttcttatttctacatgtacacactcttttaaggaattacgagtctcccagggcagaacattttaagatggatgtttgtatctaaacaacactttagtaaagtgacaaaggaagatatccatcactcagaccacagctgagatttttttttccccatggctctcatgtaagagaggagaaagcagcttaggtattgattttgctggtggtgtgcagggaaaggaagagtgttggttgtaatacacatactggggttaagtaagatgctaaacctctcctccattattcttcacagaaatttctccttccctggaacttggcagtctttttgtctatacttgtttggcattgtttatatagactattttgttttgtgaattgtcatcgcttttacctcctgctttgttatttaggttaaagaaaatatctcattcttcttggtttcccaatttttactgcagtgcttgacatattatgggtggttttcctttacatctgttgatgatggtaatgggctgctagatcgtttgaaaaatccttccaggcctctatgccaggagttatattgtggaattctgaatgcttactggttgctactagtgattcttggtcatctttctccgatgtgcctcagaaggtctagctctggattgatccagaggaaactaattatgacaggctcttggtccaagagacctcttataagtagcaatccagtaggttggtcatggagtacatgatttctggccaaacttcatttaggcaggtattaaaatatacacgttggggaggctatgccttaccctactgcatgggggtacttgacacacactttcagtatttggattgagcatatcttaccaatggtataaacaggataaaaacaatcttgcttttcatttaaaatcatagctagaagagataagtttcgtaattttctctttttttgcctgtgaattataggggtatgcaaaatttgatatttggaccagaaaaatgttgagggtaattgcagtttatgagacagaaacatgcctccactgacacaatatagtgatcaaaaatttgctcatgtcttctttcagggcaatcatgactcatgcatcagttcttaagaatgacagagatgtccttggaattagtgacacactgattcgactttctgtgggcttagaggatgaggaagacctactggaagatctagatcaagctttgaaggcagcagtaagtcttattattgtgtgtgtgtgtgtgtgtgtgtgtgtgtgtgtgtctgctttatcttgggcatggggggtcactatatttacaaagtgtggtctcactgtgaactctaaagcttttctgttcctgtaatagaccaggtgtataaataaacgtatagggagctcagtcaaagtgcatatttaaaggatggtagtattcagaaaaaggacttcttgaggagttgaagctatggcctatatgtttaataacatatttttcttgtgcactgttattatagcaccctccaagtggaagtcacagctagtattccagagctgctattagaagctgcttcctgtgaagatcaaatcttcctgagtaattaaatggaccaacaatgagcctttgcaaaattttcaagcggaaattttaaggcacctcattatctttcataactgtaattttcttagggatcatctctgttaaaaagttttctgtatgtcatgttataattacaggtcaattctgttaatatctttttgttaattttgctctatgtttgcctctgaaggaggtgagatttgtgctactttgggagattatgttcttttttcatgtctaagatttattttgatcatgtttataatataatggtaattcatttttgatgttttgtgaagaatttaaatttaaacgaatgttcttaaatcaagtgtgatacttttgcatatcattgaaaagaacattaaaagcactgggttacacttagtttccattagccgcacatcaaatgcttg

SEQ ID NO: 399 - DNA, 28588 bp, Homo sapiens
agcctcctcaggacgggtactcaggaatttcgcccgcagggactaacaccacttggacccagggactccagcttcactccgctttgtgcactgggtggggcggtcgcggtgacgtttcaggcaacgcctctgctgtcagccaataaggagcgggagacgcgtcgggcctgcgctcaatgggccgcgctggtcccgccccactgtgatcgtgagactgcagacccgctaataaaatccaccccaacaatcgctgtgtgccgctttagtgcgctcgccgtcggctctacctgcgtgctttagctccttctcgcctgatccttctgtctctcccaaccccggacacccggcttcgactggttatatcttcggtgttcttttcctctcttcttctttcgcggttcagcatgcaggaaaaagacgcctcctcacaaggtttcctgccacacttccaacatttcgccacgcaggcgatccatgtgggccaggatccagagcaatggacctccagggctgtagtgccccccatctcactgtccaccacgttcaagcaaggggcgcctggccagcactcggtgagctgggtctgtctggggctgtccacagttgggcggtaaaagagatacggcttatgaatttgaaaggcatgtaagtaatttataatatgacttataaattaggaaggcaaccgaaagatgtttctacactgtaattcttgcagcacagctttgtatcggatggtccagtgatcgtatttcttttgataagcaggactggaaggagccgtttgtccagcttgccatttagatttggcctgaaattcaggtgattttgacaaatttgcaattaaaaatcgaaggtcataacttttttgagttacctttagcagcataaattttaaagatgtagtacggagtcagcttaaaaaatattaagggtctgataacttgactagaattaagattgtttccagtagctgtatgaatagttattgagtacctactatatgccaaatacgtgctcgtatatatcatgtgtattacatgtattgtctcatctaatcctaacaacaaccctagtctgaaccgaattctcattttttcccaataaagaagctgagatttagggagttaagtaactagccttagactagtaagtattggagatggaattcaaactttagaaacttgaggttgctttaggaaccaactcctaggcactcagctacactatgctatctctaataatgctagtaacaatttagcctattgcgtcatttaagcactgtggcttagtgattaagaacacaactcatgaccgggtgcagtggcttacgcctgtaatcccagcactttgggaggctgaggcgggtggatcacctgaggacaggagttcgagcccagcctggccaacatggtgaaaccccatctctactaaaaataaataaattagctgggcatggtggcgggtaatctcagctactcgggaagctgaggcaggagaatcgcttgaacccaggaggcagaggttgcagtgagccaagatctcaccattgtgctccagcctgggtgacaagagtgaaactccaactcaaacaacaacagaaaaagagaacacaaatcttatagtcaaaggctaggtttgcattctgacaccacttcttctgagctgggggaccttgggcaagttagttaacctatcaaaacctctgactgatcctgtataaatggggataataatagtatctaccacataagttgttgagatgtatttaaggctgtatagtacataataattactcgatggtaatttgttttttcatgatgttcacatttacactatttccatttgatcctcacaacaaccaggtcagaaggcaggacaggtattatgtactttttatagaaaaggaactgacacagagtcatacatgaatgatctgtaaagcctacgaaggagccctctttgttaatcacatagcttttttcccccttttggtggcatacttgatggatcttagagaatttaaaagttgctgagatttgtaagaattagttaaagtctgtaagtccaaagccttgattatgctttggaaaccacttcagtgtgttatataagttgaggaaaatccttacagacagtcccttgttttgtgagatacagttctaaggccatttctacaactggtttagaatactctttactgtattttagaatcaaaatatgtacacagcctctctttctttctttcttttttttttttttttatttttcagagagagtcttactctgtcacccaggctggagtgcagtggtgcgatctcggctcactgcaacctccgcctcccgggttcaagcgattctccggcctcagcctcctaagtagctgggattacaggcgcctgccactgcgcctgactcattttttattttttttagtagagacggggtttcaccatgttggccaggctgctcttgaactcctgacctcgtgattcacccgccttggcctcccaaagtgctgggattacaggtgtgagccacggcgcccggctcacagcctctctttcaaacatgcagttcgtttcttgtgtagggtttaatgaaagtgtagctgcccaagctttggaacttagtgcaaaagtttaccattcaggtgtgatattaataattaaatgtttccaggaagccagcagggatggttaaatccacaaaaactctgcttaatatcttttttttttttttttttttgagacagagtcttgctctcttgcccaggctggagtgcagtggtgcgatcttggcccactgcatcctccacctcctgggttcaagtaattctcctacctcagcttcccgagtagctgagattacagctgcccgccaccatgcccagctaatttatttatttttagtagagacggggtttcaccatgttggccaggctggtcttgaaatcctgacctcaggtgattcacctctgaaagtgctgggattacaggcatgagccaccgcgcccggccctttttaaaaatcagctaagaccactaaagggaatttgaagagctgaatgagaaacgggaggtacctttctgtggcagaagccacgtgaatccaaacttttttttttttaatctgcagggtacagctgcaggtcatggtaagaaggtgatggtggggaggggtaaggatatcctggagccctataaaatatgtctgctcaggttgggcgcggtggctcacgcctgtaatcccagcactttcggaggctgaggcgggtgggtcatgaggtcaggagatgaagaccaacctccccaacgtagtgaaaccccatctctactaaaaaagtacaaaaattagctgtgtgtggtggcgtgcctgtagtcccagctactctggaagctgaggcaggagaatcgcttgaacccgggaggtggaggttgcgccactgcactccagcctggcaacagagcgagactccctttcaaaaaaaaaaaagtctgctcaacttgtcataaacaagggcacatagcaacaaaacttttagaagttattgttgttaatactgggagcttctgaatcagaaacaaaggtgaaagagtggttgtgttttgttatgttatgtgaagcagagggagaaaattataggacttctaattaatgttcgaatccttggttcacaatccggttttgacactccctaggtactattgcatttggcttcactttcctcaaagccagtcataaggattagtagaatgactggatgaatatagctagcagggtgccatatatgtaaaaggagaataatgcaatttttttttttcccgagacagagtctcgctctgttggccagcctggagtgcagtggcactatctcggctcactgcaacctccgcatcctgggctcaagcaattctcctgcctcagcctcccgagtagctgggattataggaatgcaaatttttaaaaagtattgtgtggagctgttttgccaggaattgctccctatgctttgagccacttttgtagagccaagatgtgaatgaatgttgagcattggtaggatgtgatcataacttcctgttgtatgctaaatagaacttgaatcagcctgacagatggctcactcctgtaatctcagcactttgggagaccaatgtgggaagattgcttgaggtcaggagttcaagaccagcctgggcaacatagctagactgcctctacaaaaaataaaattaaaatatttgttaggcatggtgacatgcacctgtagtcttagctactcaggaggctgagatcggaggattgcttaagcccaggagtttgaggctgcagtgagctatgattgccccaccgtactctagcctgggcaacagagtgaggtcctatccttaaaaaaaaaaacttgtatcacttaatcatttatttcttaggaaatgaaatacaggttagaattaggtttattctgttggctcatgcaagtcccttttcctaatgtttccagattaatgaaaaaaggtgagtctaacataataaacatactaataataaaaactgtcatttatttagtgattagcatgtgccaggaaacatgtagtgaatttgtgcattatctcattttatcttcacaacaattttatgaaccagatatctgtattttattcccattttacagatattgagattgactcttggaaatgtgaagtaacttacctagtgtcatgcagctcataagtggcagatacagaattcacatagagtttgtttgacttcagagcatcttgactatagccacagcactgttctgcttctgtattaaagcaagacatatcatgactaaagaatagaaactaattatggtagggtgaaactatagttctctatgttaggactctgataataaactgaaatctcttaggatgaactcgaacttgtttttttcagggttttgaatatagccgttctggaaatcccactaggaattgccttgaaaaagcagtggcagcactggatggggctaagtactgtaagtaatttccatttcacagtctagaatctatttttaaatgtatagagaaaaccatagaggcacagaatgtggaactgaaaagaaacagatttgctagttcaaaattcctgttctactgcctttgaattctttgcccaaggtccctcagttggtataatatgcatatgtgtaatcatcaggtaaaaatacgtatgaatagaggacaaatgaataaaggaaaaaattcacacgaatactacatttattaatactacatttatcatgtagtattcatgtgaaaacaatcttcatctgaaactgtcagtataaataaataaatggaaattaaatttaataacaccacctattagaatataaaatctttttttgagacagggtctctcattctgttgctcaggctggagtgcagtggcacaatctctgctcattgcaacctcctcctccaggattcaagcgattctcctgcctcagcctcctgagtggctgggattgcaggtgtgcaccaccacaccctgctaatttttttttttttttttttttgagacagagtcttgctcttgtcgctcaggctggagtgcaatggcaggatctcggctcactgcaacctccgcctcctggattcaagcaattcttctccttcagcctcccaagtagctgggattacaggtgcctgccaccacgcccagctaattttttgtatttttagtagagatggggtttcaccatgttggccaggctggtctcgatctcctgacctcgtgatctcccgccttggactcccaaagtgctgggattacaggagtgggccaccacgcccagccttttttttgtatttttagtagagatggggctattttggccaggctggtctggaactcttgggctcaagtgatctgcccacctcggcctcccaaagtgctgggattatagatgtgagccaccacacttggcctaaacttgcttatcctctggtttattcacctaataatttgtgcctgagaatagcactaaagttattttcagtggtcaataactcctgataatgtgctgtcagagattagagattaactccctaaacttttttttttaatgaagagagtcttgtgtattcattgtgattacacttatcagacaaatctcaggtctgattgcgagttttgttaaaatatttactgaattgcatattcatataattaacgtatgaatcatatctttgctctattctttatgtttgaaatttctcttttctttcttttttttttgatatggagtctccctctgtcacccaagctggagtgcagtggtgcaatcttggctcactgcaacctccacctcctgggttcaagcgattctcctgcctcagtctccctcgtagctgggattacaggcatgtgccaccatgcctggctaatttttgtatttttagtaaacacagagtttcaccctgttggccaggctggtcacgaaatcttgacctcaaatgatccacctgccttgggctcccaaagtgctgggattataggcattagccaccacgcctgccctgaaattcctttagtttgctatttttaaactgtagtttaactggcaataggccttttatctcagatatttgtaaagaattattttcttgaagtgtttcagagaaatattattaccaaggcaaaattgacttaacacaaaagtatctgtccacattatatattttttattttaaagatatcttattcttgaaatagaaaaggagattttgtaatggtattaatcaggggcctctagcaactcagcagtgatggcttcctatctgcattaaagtaagtcaggtaaatacttggaggtgtgttgtaacctataggcctgacttttcagcttactctaacttgatttttattttaggtttggcctttgcttcaggtttagcagccactgtaactattacccatcttttaaaagcaggagaccaaattatttgtatggatgatgtgtatggaggtaggtgacccctctcatttatattctgtaaacttgtattttacagataataaagtgagccctgaattaatattaacaatgttgccagtatttttgattatttattatagtttacaggtgtgacaggtacctctatgctctctcagacttgggaaaagaggagcataaacacttagggtccatgttctggaactgcttataagagagattatttatttatttatttgtttatttttagataggatctcactctgtcacccgggttggagtggagtggtacgatctcagctcactgcagtctccgcctcctgggttcaaatggttctcatgccctagcctcctgaatagctgggaccccaggcgcatgccaccacacctgactaatttttgtattttttgtagagacggggtttcgttgtgttggtcaggctggtctggaactcctgagctcaagtgatcctccctctccagcctcccaaagttttggaattacgggcgcgagccgcctcacctggccagagattatttactaagaatagtatttaaggtgctagaatgaatacgtagcacttgatcaacttgcagacatattctgctctagagaagataaggtttagagagacagtgttctcctgtaacttaatttttacctgtaataaagatgaaatacaactcaggttactctcaagagttcaaccccacacatccccttttgctttttattttttgtttggcaccagggaaactttcaaaaatttgttgagagatatgggcctcttttcccaaaaaatgttcttaagactacactgagtgattagcattttaattttaggggtctcatggattgaaccgctgaagcccatctatggctctaaatttaagaacttcccattaactcttcatttagcattaggtatatctcctaatgctatccctcccccctccccccaccccacaacagtccctggtgtgtgatgttccccttcctgtgtccatgtgttctcattgttcaattcccacctatgagtaagaacatgtggtgtttggttttttgtccttgtgatagtttgctgagaatgatagtttccagcttcatccctgtccctacaaaggacatgaactcatccttttttatggctgcatagtattccatgtgtatatgtgccacattttcttaatccagtctatcactgttggacatttgggttggttccaagtctttgctattgcgaatagtgccgcaataaacatacatgtgcatgtgtctttatagcagcatgatttataatcctttgggtatatacccagtaatgggatggctgggtcaaatggtatttctagttctagatccctgaggaatcaccacactgacttctacaatggttgaactagtttacagtcccaccaacagtgtaaaagtgttcctatttctccacaacctctccagcacctgttgtttcctgactttttaatgatcgccattctaactggtgtgagatggtatctcactgtggttttgatttgcatttctctgatggccagtgatgataagcatatacctaacgctaaatgatgagttaatgggtgtagcacaccaacatggcacatgtatacatatgtaacaaacctgcatgttgtgcacatgtaccctaaaacttaaagtataataaaaaaaatttaagaacttccattccaaagaaattaaatgttagctatttaaagtggtgaatgtggagaagacaggcttgcccttgcctttaagcccactgatttttgtatttaaaacaaaagcaaggaattttgtgaatatacatatacatatattccagatgcttccaaataattaaaatgtgatttctagaatattatcattttatctatttcctatctgaacaaaaagttaaatcactaagtcctttaaaacagcagttcccaacctttttggcaccagggaccggcgtgtttttttttttttttttgaggtggagtcttgctctgttgccaggctggagtgcagtggcacgatctcggctcactgcaacctccgcttcccgggttcaagcgattctcctgtctcagcctcccgagtagctgggattacaggcatgtgccaccacgcctggctaactttgtgtttttagtagagccagggtttctccttgttggtcaggctggtctcaaactcccgaccttaggtgatccacctgcctcggcctcccaaagtgctaggattacagatgtgagtcactcgtgcccggcctcagggactggttttgtagaatacaatttttccagggacagggggatggttccaggatgaaactgttccacctcagatcatcaggcactatttagattctcataaggagcatgcaatctagatccctcgaaagttagattctcataaggagtgcacaacctagatccttcccatgagcaattcacagtaggtttcctcctgtgagaatctgatgctgccgctgatttgacaggagactgagctcagggagtcatattgcttacccgctgctcacctcctgctgtgtagctggattcctaacaggccacaaacctgtacctgtctgtggcctgggttggggacccctgctttaaaggaagggacttactcttagtaatcattttatccctcagaaatttgcacaatgtttcgtattttatcttagtttcttatattagcttgttgagttgaaattatagaaatctgaaacctttagatacttttataatgcaatataaaagtctcatggcaaacataggtataaaatcctgaaaattgttgattttaaagaactttttacattatttttcaattttatattacctagggtcagtctacataccatcaaaagtctagtttctcattaatgacagaatattcttttgttgttgttgttgttattgagtatcaatatcaattttttctttaagtttttatgtgtaaaaatcaaatctaggtgtatttataaaaaattattttaagtcaaatgatttaccttgtttcactgtaaaaatctggtagtttgatttatattgtctcattttatcgattaaaactttcagaactacataacaaaaagatcaaaaaagtacaaagaatagtaaccaattcttttccattacaaagtatattgaaatttattttgaacctttcattgacattgattcatttagtttagagttgagaactaggtagaaattgtttgaaaagatatgatgtttcaggaagcatgtcacttagtggagattggatgttttgaaaaacattatttgcttcatgctacttttggatctcaagtgtgttttatttgactcttgagcctttagagaacaaaccttattattctttactatatcagatagccaaactatttaaccaaactagaattgcttttagttgcattttccttggtgactgagagttccatatattttgtaagtgtttatacatagaaggaatgaatgtttcttaatgcaatgttcttttcattttatctgattcccttctgtctcaggtacaaacaggtacttcaggcaagtggcatctgaatttggattaaagatttcttttgttgattgttccaaaatcaaattactagaggcagcaattacaccagaaaccaaggtaactcagctcattttcagttttgcctgtttttccttcgatgttttgttttcatcatttctgtttactagaggatataatttaatgtgaataacaaattttattttatgccattggaaacatcaacaaaattaagatagactgtcatctccggggtgttatagcataatggtagtacatgatttctggagtagaattcaaattgtgattctgttatcttagttagtatattatcttgggcaaattatttaaccaaagtctcagtttcttcatttgcaaaatggagataattataccggttttatagaaacgggagtgtgagaatcaaatgagataatgaatatgaaatgcttagtatagttcctggatacatggtaattgttaaaaaaatttctatgcaggagcacctaatttttaactgcatagccaaaagagtattggtaacagaagtcatcacagagattggactatagaaaaagaagcctgccaaacccccaaactcgaagcacagtggctttgccgggctgtaagggatgctgcccagatactagttagatgtggagaataggccacaagcaatctttagcttccatcctgggaaatttgtatgccaccggaaggtgttttgtgtctgagtgaatggcatatgtgatattctttcttgggaccttatttaaattctgtgtggataaaagaaggaccagtgtcttttataagtcagctgtttacaactttttgctaatgattaaaaggttagaattgtacccaagattatgttgcaatgaatgctaaaaaataaatatcttttcatgtacaaataattactttgcacattaacatggttgagcttttggtaattaaggtttgtttccagaagaacttgttttttatcttgcttgggagaaaagtcacattaaaatagctggtctgagtcttttttttttttttttttttgagacggagtctcaccctgtcacccaggctgtagtgcaatggcgcaatcccagctcactgcaagctctgcctcttgggttcaaatgattctcctgcctcagcctaccgagtagctgggattacaggcgcccatcaccatgctcagctaatttttgtatttttagtagagatggggtttcaccttgttggccaggctgatcttgaactcctgaccttgtgatccgcctgcctcagcctcccaaagtgctgcgattacaggcatgagccaccgtgccgggccctggtctgaatctttctaagggaggaaagcaaattatgagtacagtaagtcttgtcaacagaattttatatagtgactctaccaacttgaattaataccttttccttcctaaaatatcaggtttttcacttgaagtagaatgtttaagtccatgtaaaacctactttttatttatttggtaatttttattttttttattatcagtaggaataataaattcttaccaggaataatttttatagattctttaaataattcaagatttttgtagaatatgtattatttaaccatcttatcttttccagagtaaaactctaaagtcagaagagtttaaaccagatctcttgcccatttaaataacaggtaataaaaaaagaatcagctgggcacagtggctcatgcctgtaataccagcactttgggaggctgaggcaggaggatcacttgaaccaggagttcaagatatatagcgagaccctttctctgcaaaaaaaaaaaaataataataataattggccgagcatggtggcacatgcctgtagttccaactactggagaggctgaggtaggaggatcacttgggcctgaaaggtcgaagctgccgttagctgtgatcatgccactgcactctagcctgggcaacaaagtgagaccctgctgcttaaaaaaaaaaaagaaagtaattcagtacaatggcatttcgttcaacaaatagaattcttttctttggtctttttgataactatcaagcatctaccatgtgtctgaattgtggtaggttttgagatataaaggtcattgttactttttaagtaggcggtaaccacgttttctgttgtgggtgtcacttttcttctttagtctaaagcccatgctcttcaagtcttagatacttattctatagtttctagagtttctggcattaagttcatattaaatatatttttggcatcatagggataattctctttcattaaaattctaggatgtattcttacacaatctatgttattcatctctgagacaaaatttccagacactgagctgtctttggaatacactttcttttttaagaaaagtacaataattaactttagtacttttctgtttacatgtacgttatctcacttgatctttacaaaaaattctgtaagataggtattaccaacccaattatacagatcaataggatacattacatacctacggcttcagaaatttgcaggtaaggctgggattcagatttgaacctcccaacatcatcatccatgtgtttccattatacaatgtagcttcccagattgttacaatatatgagatgtatgtttgtaaagtatatttttacaaactactgttatttgctgaattattttagcttgtttggatcgaaacccccacaaaccccacccagaaggtgattgacattgaaggctgtgcacatattgtccataagcatggagacattattttggtcgtggataacacttttatgtcaccatatttccaggtaaatgaaaataattttttttggcacaattagtagaccacatatatctgtaattaggaaagaaaggacttgcttaaattaaaatcatgatcaaattcatgaaatctaatcataattaattatttactggatcgagaattaaatttggacctcttctaccattagttaatatcttttcaaacctatgttaatatcctctatgttactttgtgttttttatttattaaagcttaccagttctcagggctgtgcgtggtggctcacgcctgtaatcccagcactttgggaggccgaggcgggcggatcaggagatcagggatcaagaccatggtgaaaccccgtctctactaaaaatacaaaaaattagctgggcgcagtggcgggtgcctgtagtcccagctactcgggaggctgaggcaggagaatggcatgaacccgggaggcggagcttgcagtgagctgagatgacgccagtgcactccagcctgggtgacagggtgagactctgtctcaaaaaaaaaaagcttacgagttctcttagagtgtgtaaactctgaagaaatggccttattatgtgattgtatctgctaataccttatgcatagtaaggacttgaatgtttatgcattgattacaaatcagtcatatttttcagtcaccttgaatatttttatatatattctaaaagaaaagtgatgctcaatgatttcagtatatattatacatattatttctcttcttctagtttttattccttcagcactccatatactatgcctagatctctttaacttattattattttgaacttttactttatttattttacattatagctgtaagtatttatagtgctcttatgttagtctctttgggtggccataacagaatactataaactgggtggcttacaaacagcaatttatttctcacagttctgaaggctgggaagtcctcaatcaaagtgccagcagattcagtaccggtgagggcccactttctggtccatagatggagccttctcgctgtgtcctcacatggtagaagagacaaggcagttatctggggcctcttttatcagggcactgtattagtccattctcacactgctataaagaaataatccgagactgcgtaatttataaagaaagaggtttaattggctcacagttctgcaggctgtacagaaagcatgatgctggcatctgcttggcttctggggaggcctcagaaaacttacaataatggcagaaggcaaaggggagcaggcacaacacatgaccagagtaggagcaagagagagaacgagggggaaggtgctacacacttttaaacaaccaaatctcacaagaactcactcacaattgtgaggacagtcccaaggggagatgactctaaaccattcatgatatatccaccctcatgaactaatcacctccctccaggccccacctccaacatttggggattacaactcaacatgagatttggtggcgacacagatccaaaccatatcaggcaaaaatcaccctaatcacctcccaaaggcccacctcctaatcatactagtgattagatttcaatctatgaattttggaggacacaaatgttcagaccatagcagctctctttaaagatttctttcgctacctagccccctctgcatttgtttcctccccagaccacccctcccatacatctatcctttccttttttctctgtcttgtgtctagtttcatcctcttttgtgtttcactttcttttgtagatcactttgggatctctttataattaacttgtttcctgccttttccacacaagttctccctctctttcctctgagtaacccaactctttcctttccttgttaggagataccttcttcctgctcttttcttcctgcctgtaccttgtcatacttagtacacttcctgtagttcatctctattctgcagagttcctgaaaaccagctcattttctctggctcttcaattgggcagatgtttacaggttttattgtttacatttccccccttctgttctgggtccctgaagttgatccaggttgctgcctccatgtgactggctgactccctgggcagttggtataaacctgcttttcaccttcctccattttattcgaaggcattgtcatggtttattttcctttcctgaagcacacttcctggctacattgcattcagacaccttcgtgggccatctgcctttggctcataatgtatctttgattgctgattttatcaggtaaagcagtctgtttcccagtgaaaaatcttctggcattgtctatttggcatcttctatttgtcccaggtggttttcagtgtaagattccttatcgcaactccttagcccatatgccacttacattaggccagttaatacagcataggatagctttagctgagacacagtgagtcctgtatattcccaaaaagattgcatacgttttgtagcctggacctgcccgggttactcatcaaacctggccctctttctcctattactgtcactaacataggtctagtttttctacctttttgaagcccacatcacattccgcatgccaatgattggaatttgcttcatttcaatttggatttattccagctgaaatactcagaatcgcatcatccctaagtagccacatgtgttgtttccatgaagcaaatcttcctgaaaaaaatcttctcattgtcttaccttaatgaaaatggaatatattctctttcttcccagtcttttgtcctctggatcttctgtaagtctcacgaaaggcaaaatagacctaccatcatcaagtttcagagtagcacctctggagtcaggcagtctgggtgtgagtcctggctctaccagctttttaatctgagggatctatctcatttttcttagtcccctttcctcacctgtatgatgagagccataaaggtactgattttattgagttaggtattttgtacactgcttccctgggttatataaagtacgtagcatgattctcagaagataatgagatcagaggtgttagtgatttggtttttatttttccttctcttttggctgtagagtttacagaatgttagcactagaaaagaccttaggcctcacctactttgaccccatccctttaggaaccctaaatgaaaagttcccatagccacctatactaatatcttccaaagactaaacagctctaatgagggtgaaataaaaacacacagttctatgtttaggaaaatgtaaagggaaagatgttgataatgtatgtttttgtttgtttgtttgttttgaaatggagtcttgctctgtcgcccaggctggagtgcagtggcgcgatctcagctcactgcaaccaccgcctccccggttcaagcaattctcctgtctcagcctcccgagtagctgggattacaggtttccaccaccaccccccgctaatttttgtatttttagtagagatggggtttcaccatgttggccaggctggtctcaaactcctgacctcaagtgatccacctgcctaggcctcccaaagtgctgggattacaggcgtgaaccaccactcccggcttgacagtgttttattaagtggaaagtctacacttttcactctggttgtaaacaaatacattttaagactacaggattaacctagaggacattatgttaagtgaaataagccaggcacagacagacatatatagcatgatctcattcatgtgtggaatgtaaaaaatgttgatctcatagaagtagtgaatagaacagcggttactagagtctggggaagggagggtggaggtggggaggacagaggatggtcaatgggtacaaagttacaattagaaggaggaatagaggaataagttttggtgttctactgcacaaaaggatgatcatagttacaataagatactgtatatatcaaaataggagagaggattttaaatgtttctactacaaagaaatgataaatatttgagatgatgggcatgctaattaccctgcttttgatcattacacaattacacatgtattgagcatcacattatactccatgacttaaaggattaatttacaggaaaattgggtgaaagaaaacacttttaaaaattccttttcatttttatttttcttaattctcccagtttcagacatatttatttatttatttatttatttatttgagacagaatcttgctctgtcacccaggctggagtgcagtggtgtcatgaaaagctcactgcaacctctgcctcctgggttcaagtgattctcctgcctcagcctcctgagtagctgggattacaggtgcgtgccaccatgctcagctaatttttttgtatttttagtagagatagggtttcaccatgttggccaggctgggctcaaactcatggcctcaagtgatccacccacctcagcctcccaaagtattgggattacaggtatgagcccccgcacccagcaaatttctttctttcttgttgttttttaagataaagtcttgctctgtcactcaggctgaagtgcagcggcttgatcatggtccactgcagcctgaaactcctgatctcaagtgatccttctgcctcagccccctaaattgctgggattacaggagtgagccattctccaactcccagccgtctagatttcttgtaatacctaatacaatgtacatgctttataaatggttgttacactatattgtttaggaactaatgacaagaaaaaagtctgtacatgttcaatacagacacaactgttcatctatttttccaagtatttttttacccatggttggttgaatccatggatgtgaaacccacacataggaagggctgagtaattaggaatcaagatcatgacaaaccccaaatgtaaataatcacagcatacgtcatgaggttttaatgattaaaaatctaagcagatgagtttatacttactctacataaaaattgctgaatgttcatttcaactattttatgtgtttaatgagtcataaaatactagagtctctactgtaggtaataaatttagagtcctgtcagcaattgctataaagaaacaggttcaagagaccagttgacctgggcttatctgcgctttccaagaaacttttgccttcagattcaatactggattcaatactttacatttttctttggtgggagggaggcaaaggagaaataatatcagagatcctggaaaattttaagatgcacatacttttgcaaagttagtattgattagaataagaatggaatttataattgcaaataggcaggtaatgaagcatattttcaaattgtttctcatttaaagtaaaaaacttgttctttcagcgccctttggctctgggagctgatatttctatgtattctgcaacaaaatacatgaatggtaagatgcatactttgaatgttctttttcatggataggtgaaaattgcatagggcttggcttttgatcccttttctttgattattttgtagattatttcctgtgactcatagagagagtaaaaaaaaaaatcctttgattaaatgtaggatttcattaacagtacacaaaactatgctcatgatttatgagaagaggattaaagttggccataaaaagttatgcttttatcttgctgacaccttaaagaaacattttgtttttatataatttttattttcttgttttagacatagcttttgctactgtccagttgaataaaggttacttaaacttattttatagagctttttccctgagagttttttcaagtgaaaatcacattttgaaaattataaaataaagagtaaacataaattgtttctaactgaaatttttgtttgtttgtttgttttttgtttttaggccacagtgatgttgtaatgggcctggtgtctgttaattgtgaaagccttcataatagacttcgtttcttgcaaaactgtaagtattaaaaagtgcaggttccctatgacactctcagtgactacatttgatatttgtatttccactaagtgatgtgaagtgatggcattctaataatttatgaagaaatgaaaaatagaggagaaaaattctgattttttttatttattaatttttttttttgagatggagtttcactctgttgcccaggcgggagtgaagtggcgtgatctcagctcactgcaacctccacctcctgggttcaagcgattctcctgcctcagcctcctgagtagctgggattacaggtgcccaccaccatgcccagctaattttttatatttttagtagagacggggtttcaccgtgttgaccaggctggtctcaaactcctgacctcaggtgatccacctgccttggcctcccaaagtgttgggattacaggcatgagccaccgtgcctggccaaaaaaattttttctgattttagaggaaagtgttataaaaatagttattgcaggctgggcacggtggctcatgcctgtaatcccagcacattgggaggctgaggcaggtggatcacttgagcttaggagtttgagatcggcctgagcaacatggcaaaaccctgtctttaccaaaaatacaaaccaattagccaggtgcagtggcatgtgcctgtggtcccagatactcagaggctgaggcaggaggattacctgagcctgggaggcgaaggttgcagtgagctgacatcgtgccactgcaatccagcctgggcaacagagtgagatcctgtctcaaaaaacaaaaaacaaaaacggttatagcatagcaaggctttatgatatgatataagaaatgagtttttttattttcatgtccatcttaattataatcataatttgataaagccctagtgaatttttagtttcaagacttaatggtttttttttcttttttaaaattacatttgaaatgagggctttcatatactataccttttatatcacgaatgatggttaattttaaatagcacttacagtataaacttacatttttcaatagatgtctaaacaccatttcctatttacattgcttagtttatctccagtatagttaaagattaagccattgtaacttgacaggtaaaatataaacatgattaggaataaaaatgtcctccacaagggaaactgaaacttattgcttgataagtgtcctttggtttataaaaagtagaaatgaagtatatatcctggaggcatgtgaaatcattgaccgctttgcacaaaggctaaatagaatattagtagaatattcagtaataataggacttgaactgctgtttttctctgtatgttaaaataatttttcaaagaaatacaaggttaggctatgaacaatttatgattttattaaaatcatagaaaggactacttatcttcatatttgagaagtttatatcattgtgcttttacttagttttcagcatatttgcttcccctcattttaaagtaaatttctctaagcatattctatgctttgttcttctgcttctgatttgatatattattttcctcctagaactcaaacattgagctttacacctagcttctgagagtcactgtaatggaaaagagaagccagataatttcttggccataccctgccttcaaacttatccaggatgtgttcattttgcagctcttggagcagttccatctcctattgattgttacctctgcaatcgaggtctgaagactctacatgtccgaatggaaaagcatttcaaaaacggaatggcagttgcccagttcctggaatctaatccttgggtagaaaaggttatttatcctggtatgttaatttgatttctaagcagatctactaggatttcagcagttatcctgagcatcgtgtttatgtaacatttatttgtaagttaggtgctttcacgtattgtttttgttcatttattattgagcactgccatgtgtcaggctctgtggtgggtcaggtggaaagaagatagacctggtctctactgttgtattgcctctagtttagtggatgcttggatagtagaaaatcagttttatgcattagttgttcctgtggtggtctgtgatttgaaggcttgtgtatacctattcaaagattttaacattagacttttcagttgatttgcttataatcttgtctgtctgctattcagcattagctgtcactttaatctgatagaggtttgtcccagttgagacttgatattaggtgctaaaattcccctgaggttctctctctctctttttttttttttttttttttgagacggagtttcactcttgcccaggctggagtgcaatgatgcaatttcagctcactgcaacctctgcctcccgggttcaagtgattctcttgcctcagcctcccgagtagctgggattacaggtgcccgccaccacgcccagctattttttgtatttttagtaaagacggggtttcaccatgttggccagtctggtctcgaactcctgacctcaggtgatctgcctgccttggcctctcaaagtgctgggattacaggcgtgagccactacgcccagccccctgaggttctctcctgtatttctctcctgtatttttattccttcacctcttccagcatctagaaagtcttctgtggagttggctgacttacatcttactttttgaatttatttttaccagtcttttaagctgtggtggtcctaagtagttcttttctttttagatccttttgagggttctagcatctagaatatatagaaaaattaagactggaatttcactaggaaattcacaaggaatttagagaaaccaaagcgaaatacatatgaaactaaatgccctaaaggtactttaggtaaagagctgttgattgatatatattttggatggagggagagagaagagttttgagctatgccatgaagaatgggcagcattggttaaaagggcatagacaaggtattggagatttattcaagaaatttttattaaacgccagctatgagccaggctttgcactaggaactgggatccaattagtaacaaaagaaatggatttgccctcatggagcaactctggtggctaagacagatactaagcaagaaattacaggatataattaacaagggaagtccaggttgaagggacagcatgtgcaaaggtcctgagatgaaagggagtgcagtggtgctggcataaagaaagctgaagagggtagaaaagatgaggcaacatgaagctggagagataggggcccaagcaagtagtcagatgtgagcatggcataatcctcgtcttaggcttatttgcagttaagtagacagtgaaaaataccaccctccccccccaaaaattacatgtttaattctaaaataagacttatgataccttatgattacagggctgccctctcatccacagcatgagttggtgaagcgtcagtgtacaggttgtacagggatggtcaccttttatattaagggcactcttcagcatgctgagattttcctcaagaacctaaaggtaaacttacaaaataggtttaaaattgtaggaggtaaggccttacagcagttcactatctctcacttctactcaagccagataatgtttttgtatctgcaggttacactcataaacctctttatcatgaaatgcattgggttgaaaacaacttaaacaacaatgtagcagacatctaaatatgttcacttacttaactctccacatactacaatcagtttggagacacagagtattctaatgcatttatttaaaagtgaaccccttttttcagatgaaataggtaaaacctcgaagtagtgtgcagttagtgcactgcacaagggctgttctaaaatccatcctgtgaatggctttccaaaccctgtgcctcctaagctgcatctgactggggtgaggcctttgtctaattttcaaaaagccaggaggaggctctcaggggccttgagcaagaggcctgtccaactccatacactgggcttaaccttgagctcatgcagtttatatactacagaatagattaacagaaagctgccagattagtcaaagtgttcctggtgtcaccttaatttaatacatttaccaaagtaacttttaaaacatttgtaaagttttatgacactatcacactcaacataaaaacagtggttttttttttttcccctattccagcagggatttaaaggatgtatttcataagtgatatatattaacaaggaagtatgtataacttgggaagcatttagagatttttttatttaagtggtaaccacagagcaaagtctcaaatgcaataatttttttttttttttttttttttttaggcagagtttcactcttttgcccagactggagttcagtggcatgatctcggctcactgcaacctccacctcctgggttgaagtgatactcctgcttcagccttccaggtagctgggattacaggtgcgtgccaccatgctcagctaatttttgtatttttagtagagatggggtttcactagttggccaggctggtctcgaactcctgacctcggtgatccgcctgacttggcctcccaaagtgctgggattacaggcatgagccactgtgcctggcctaaaaacatttatttttagattttagtatttttattttactagaaaatctaaattcatgttttctttgctatagctatttactctggccgagagcttgggaggattcgaaagccttgctgagcttccgtaagtatagttctgtttttctcagtattttaaatttgatgtcagctttaatgattgggaaagaaatatgataaggtcagggataattcaagatatttaacaataagaatagcaggacattaatcagaatggactctaaccctgtcaagatggagaccctgataaaatctcatggagggcttcttgttagtgagcggtgtcctcccaaatgttgcttccttccctgctctgtcaaaaagagattccagcagtaactgtattctaggatctctgatctctgacctctaagcaagggccacatgttctaccctactcagccttagaggggattggagactttgtactagaaaagctgttttcaaggctctttgggaaacagaaaatgtgtctctgatgaaactcctccatgcccttgattgttggagaacagccctactagatactgtcaaatcttttgttttctgttctctgtaggataaacctttaatgtcttcatgttgtgtacaagataaatccaaaccctaacttggtaccaggcccttcagtatctaacccaatcaattcatctagttttttcaaagcatcagaggatattggtacaagaagcagtctaagatcatacagtccagcagcttattttacaggcaaggaaacaaagatccagaaagttgagctgattgactcaagtgtcacacaggaacgtgttcgcagcttcactcttggatttgcatcagaaacagtgaggggaggtaaaaggtgcttggatctagatttgagatctgcttccaccaattagttaacctttaaacttccattttttaacacataaaatgagattaataattaatgattttcggcctggtgcaatggctgacgcctgcaattccagtactttgggaggccgaggtgggccacttgaggtcaggagttcaagaccagcctggccaacatggtgaaaccctgtctctcctaaaaaaaaaaaaaattatccgagtgtggtggtgtacacctataatcccagttacttgggtggctaaggcacgagaatcgcttgaacccaagtgatggaggttgcagtgagccgaggttgcagcaagccaagatcgcaccactgcactccagcctgggtgatgcagcgagactctgtctcaaaaaagaaccaaaacaacaacaaaaaattaatgattatcatttattgattacctgtccccccaagcattcctgatatatatattacctttattatatgctactatgaccatatgttgtaattactgcagggttaagtcaacatcataacctaactatttttaactgtactaaatgtatacggtgtatttctgtgtcttcatttttataaacatttatggaataacttgttttgcaagcattgtgtggagaaatgtcaggtcccaccaaagtttaggcctattttctgtctttgtataggagtttacagttagaccaaaagtcaggcagtctcaccaagttaaaaaaaaaaaaaagatgtctaaataatgacttgaaataattcatgtaacgcagatttttgttagtctttccggaagatgcctgctagtaagtttggatgcacaagagggcacactcagcatgtgaaatgggtttgtttttcacagtaatgaaatgtgtattacgttaagactctcttgtttaaaaaattgtcttaaaataaatctctcctgatttatttagggatttttgtttaaagttgcttggcccccagacactctggtttaggctataaccccgatgccagaggatgagtggatttaggtcagggcttgtctgttctatcacccttcattctgtgtctcccaactctgctgctactagtgcagcattgcaatatgggaggaaggaagtgaagctaatgtgtattagcttagtctcccagcctcacaacacatgtaactctgtgaccttagaaaagttactcatcctccctaaatctcaatttcctcaattttaaaatgtggacaacactctacatagctcttaggtttgttgcgagaacatggggaaaaaaatccctaagctaatgccttcgttcatactaagtacccaataaacgttagcacctactatgaactattatcttttattagacatctctactacattccaagtgcttagaagtgctttatacatgttccttcaaattaatgtctgtgacaaacctttaagacaggtgttatatccaatttttattcattaaaaaaatgaattaatgcacacaaaccacctagtagagtatctgtctcatggtaagcacacagtagatgcatctattattatttcagataaggaaataggcactgaggatgagtaacttttataaggccacataggcagtatgtggaagggctaagattcatacccaagtttgttggtctctgagacctgagttcttatttctacatgtacacactcttttaaggaattacgagtctcccagggcagaacattttaagatggatgtttgtatctaaacaacactttagtaaagtgacaaaggaagatatccatcactcagaccacagctgagatttttttttccccatggctctcatgtaagagaggagaaagcagcttaggtattgattttgctggtggtgtgcagggaaaggaagagtgttggttgtaatacacatactggggttaagtaagatgctaaacctctcctccattattcttcacagaaatttctccttccctggaacttggcagtctttttgtctatacttgtttggcattgtttatatagactattttgttttgtgaattgtcatcgcttttacctcctgctttgttatttaggttaaagaaaatatctcattcttcttggtttcccaatttttactgcagtgcttgacatattatgggtggttttcctttacatctgttgatgatggtaatgggctgctagatcgtttgaaaaatccttccaggcctctatgccaggagttatattgtggaattctgaatgcttactggttgctactagtgattcttggtcatctttctccgatgtgcctcagaaggtctagctctggattgattcagaggaaactaattatgacaggctcttggtccaagagacctcttataagtagcaatccagtaggttggtcatggagtacatgatttctggccaaacttcatttaggcaggtattaaaatatacacattggggaggctatgccttaccctactgcatgggggtacttgacacacactttcagtatttggattgagcatatcttaccaatggtataaacaggataaaaacaatcttgcttttcatttaaaatcatagctagaagagataagtttcgtaattttctctttttttgcctgtgaattataggggtatgcaaaatttgatatttggaccagaaaaatgttgagggtaattgcagtttatgagacagaaacatgcctccactgacacaatatagtgatcaaaaatttgctcatgtcttctttcagggcaatcatgactcatgcatcagttcttaagaatgacagagatgtccttggaattagtgacacactgattcgactttctgtgggcttagaggatgaggaagacctactggaagatctagatcaagctttgaaggcagcagtaagtcttattattgtgtgtgtgtgtgtgtgtgtgtgtgtgtctgctttatcttgggcatggggggtcactatatttacaaagtgtggtctcactgtgaactctaaagcttttctgttcctgtaatagaccaggtgtataaataaacgtatagggagctcagtcaaagtgcatatttaaaggatggtagtattcagaaaaaggacttcttgaggagttgaagctatggcctatatgtttaataacatatttttcttgtgcactgttattatagcaccctccaagtggaagtcacagctagtattccagagctgctattagaagctgcttcctgtgaagatcaaatcttcctgagtaattaaatggaccaacaatgagcctttgcaaaattttcaagcggaaattttaaggcacctcattatctttcataactgtaattttcttagggatcatctctgttaaaaagttttctgtatgtcatgttataattacaggtcaattctgttaatatctttttgttaattttgctctatgtttgcctctgaaggaggtgagatttgtgctactttgggagattatgttcttttttcatgtctaagatttattttgatcatgtttataatataatggtaattcatttttgatgttttgtgaagaatttaaatttaaacgaatgttcttaaatcaagtgtgatttttttgcatatcattgaaaagaacattaaaagcaatggtttacacttagttaccataagccgaaaatcaaatacttg

SEQ ID NO: 400 - DNA, 185 bp, Homo sapiens
tctactaaaaatgcaaaaaaaattagacggacgtggtggcgggtgcctgtagtcccagctacttgggaggctgaggcaggagaatgacgtgaaaccaggaggaggagcttgcagtgagccgagatcgtgccactgcactccagcctgggtgacagagcgagactccgtctcaaaaaaaaaaaaaa

SEQ ID NO: 401 - DNA, 185 bp, Homo sapiens; identical to SEQ ID NO: 400

SEQ ID NO: 402 - DNA, 186 bp, Homo sapiens
ctctactaaaaatgcaaaaaaaattagacggacgtggtggcgggtgcctgtagtcccagctacttgggaggctgaggcaggagaatggcgtgaaaccaggaggaggagcttgcagtgagccgagatcgtgccactgcactccagcctgggtgacagagcgagactccgtctcaaaaaaaaaaaaaa

SEQ ID NO: 403 - DNA, 2902 bp, Homo sapiens
aggtaaaggtctcaggtaaagattcaggtactgaactcaagtccctcagataatacacctcatgcaagaaccccagataatgagtttcagacaaggcttccaataatggtttctttgatagctgtgctaccttgagcctcagtgtcctcatttggaaaacagggataatagcccctacccctatcatgagaatttccattaaaaattaattaattaaaattaaatttccattaaattaaagttctaggtaactactcttaggtgagaccccagatgaggcctccagtcacctctggtaacgtcccccaggcaaagctctgaggtcgcccctgcaggtaaccctctatttaagactccagtaactactctcatgtaagtaacccaggtagatcccttaggtagaggtcccccatcaccttccaggtaactcccaaggtaaggacccaggataacaccccctctaggtaaaggttccaaggcatgccccaagagcacctcctcctcacccttctggggacattcctgtagcaaccagaggaccggacacatacagtccgcctggcaatgggcaatggactacgggctgatgtgtgggagaccttccagcagcgcttcggtcctattcggatctgggaagtctacggctccacagaaggcaacatgggcttagtcaactatgtggggcgctgcggggccctgggcaagatgagctgcctcctccgagtgagtgtgcgggtacctggtgtgcagctgccctgaggctgagcccacaggacctatgtcaacactccaccctccaccccagatgctgtccccctttgagctggtgcagttcgacatggaggcggcggagcctgtgagggacaatcagggcttctgcatccctgtagggctaggtatgggggttgaggagcctttcctgggtggcaggggtggcgaccctcagtcttctgcttggctggaacgagctgctcaaaagcttgacgttggtgctcactagaggggtctgcagccttcatctggaccctgagccagtggcctgccttaccaccatctggggcctccgcctcagcttctcggctctgtccagctcccctgccttgatctcttgctctgatttactgggtctctgggtgtccatctgatttgttctcttgagctttctgtggaagacggcattccagccattggtcccttgtcctgtaccttctgttagtgtcttctcccagggccttgcaaggtcctggtcatatctattctcactgccatttgtctgtccgtcttccatcccttgttatccttttcctgtttctcatgggctccccataccgccttctctatacttctctctcattttctgtgtcgcttgtcgcagtctctcaaggtctctgaatgtctctctcatctctggatctccctgtctgtgtctttgggtctgtccttggcagggtgctgggtgatgaagagtccaccgttgttgaaaacctccagcagggggcttggctggtgggctccaggggttcttgttcctgctcctaccccaggggagccggggctgctgctgaccaaggtggtaagccagcaacccttcgtgggctaccgcggcccccgagagctgtcggaacggaagctggtgcgcaacgtgcggcaatcgggcgacgtttactacaacaccggggacgtactggccatggaccgcgaaggcttcctctacttccgcgaccgcctcggggacaccttccggtccgaggcagggtttctcggggcggggctggcgcggggccacggacgctttcagatcctagagggagtcaggctgaagaggcgggactttcctgtcgtaagagggcggaacttggagtcaggacttctcacgcgaaggcggggcttctcgattttcgagggggcggggctgactgggcctcctgatccccaaaaggggcggggcgggggcaagaggcggggcctctccttcccgggggcgtggtcacaagcgccggctccctccttgcagatggaagggcgagaacgtgtccacgcacgaggtggagggcgtgttgtcgcaggtggacttcttgcaacaggttaacgtgtatggcgtgtgcgtgccaggtgcggagggttctcattttaaacttccaacagctttgtgggtggaggggtcgttattctgattttacaggtggggaagtgctagggcccagagaggtttagagacttgctggctctcacagccagtgagcagagctgggcgaggctggagggtcagctatgggccctcgagatgggtcagccgagagtgaccagactgctctctaggttgtgagggtaaggtgggcatggctgctgtgcagctagcccccggccagactttcgacggggagaagttgtaccagcacgttcgcgcttggctccctgcctacgctaccccccatttcatccgcatccaggtgagcccagggtggcctggtgggtgggtggaagatcatagccagggggcgggtggatgtcacagtgattggaccatggtcactgccctgcaggacgccatggaggtcaccagcacgttcaaactgatgaagacccggttggtgcgtgagggcttcaatgtggggatcgtggttgaccctctgtttgtactggacaaccgggcccagtccttccggcccctgacggcagaaatgtaccaggctgtgtgtgagggaacctggaggctctgatcacctggccaacccactggggtagggatcaaagccagccacccccaccccaacacactcggtgtccctttcatcctgggcctgtgtgaatcccagcctggccataccctcaacctcagtgggctggaaatgacagtgggccctgtagcagtggcagaataaactcagatgtgttcacagaa

SEQ ID NO: 404 - DNA, 156 bp, Homo sapiens
tactcactcactactctaactgtccacccatccatccactcactcactactctaactgttcacccatccatcttctcactcactactctaactgttcacccatccatctactcactcactactctgtcacccatccatctactcactcactactct

SEQ ID NO: 405 - DNA, 513 bp, Homo sapiens
tctcttcttcggcctcttgaacctggtgccgtccccattggagtcagtaggggtttggcacaatactgtgctctcccgtgcctcagcctcctcatcaggctatgggccactttgagacagaactagccttcgaagggagcagtgcaggcagcaccccacgtgggctgtgaggcagctgggcttcacagagttcctggtagcattcgaggctcttcctgtcagccctgcagcctggagctgagacagtatccttttcagttggggtcccactatgagcatctgtttgtcattggtggtggccgtgcactgtaattctcttctgcgaagtgatagttgttgtgacttgctatttctgtgccctgtgtggccagtggagccccacatgttccctgaagagccctggccctttcatacaactggacttggatcctcccacgcacacagtaggttgtccagttccttcatactcctccagcctgggtgacagagtgagactccgtctcaaaaaaaaaa

SEQ ID NO: 406 - DNA, 709 bp, Homo sapiens
ctggcttcctcttgaggaaggcctcagaagacccgcctttggtcacaggacagaagctgggccaagaggcaaaggttttggccgccacaggggaaactctgggctcagagctgccgaagtgactcacgggccctgctgggaagcagctgacgttccttgtctgcgccttacaaaaccacacgggctgcgagtgacagctggctgctctgagtggcggaggaatgttgttgccagacaggttcctgaggcatctgctgagctgtgctccagaaaccagccctgggcagctgccacaccaggcagcctccacccctccccacaaccaggagtcttggagggcacccccaccaacctcaacagaactctcccctcagggatccgtggaagtcagccactgccacagggacagccaccccttccaggcaggagctcatgggaaaccaagaccagggaacccatcccacccccagtaagacttgaggccagggaggttggaggggtctccctgtgaccaaatctgtggccatcacaaccgaccttgaaccataatactaagaatgataacaataataatcacagctaacccttcacactcactacatgccgggcaccatggcatggagcactttttctgaattatcacatgcattcatttcctggggctgccgtcgcaaactgccacaaactgcatggcttaaaacaacaaaaa

SEQ ID NO: 407 - DNA, 187 bp, Homo sapiens
aaatctccctcttcttaggaggacaccagtcatattggacttaaggcctacgctaatccagtatgacctctgcatacctctgcaaaggcccaaaaaggttccaaataaggtcatattcccagggttccaggtggatataaatttgggggaacattattcaactcaatacaccatgtgtaatcttctt

SEQ ID NO: 408 - DNA, 291 bp, Homo sapiens
tttaaactccatctgtcacttctcagttacattttacgacatagcattttattttgattgtggtgaatcatataattaccattttaaccatttttaagagtacagttcagtgacattaagtatattcactgtgaagtgtaaccagcatcatgacctattttctaaactttttcttcattccacactgaaactttgaagctgttaaatagtaactaatttttcccccttgccttcattctctggtaatctcaattctcctttctgtctttatgaatttgtttattctgggca

SEQ ID NO: 409 - DNA, 447 bp, Homo sapiens
gtgtctgttttatttcacttagtataattatctcaagattcatccatgttgtagcatgtctctgaatttcatcccttttaatggctgaataacattccgttgtttgtataattcatctgttgatggatgcttgggttgttcccacctttgggttattgtgaatcatgccgttctcttttggatgctgtaaatgtttggtagactctagagtcccacagtagttactttagacaattcctaccagctcagtggttgtttaggtgtagtgacggattcttggagcttctttttttttttctttttttttttttggagacagagtctcgctctgttgcccaggctggagtgtgatggctcagtctcggctcactgcaacctccgtctcccgggttcaagtgactctcctgcctcagcctcccaagtagctgtagagtagctggaattata

SEQ ID NO: 410 - DNA, 106 bp, Homo sapiens
tttttttttatttttagtacagacggggtttcaccgtgttagccaggatggtcttgatctcctgacctcgtgatccgcctgccttggcctcccaaagtgctggcat

SEQ ID NO: 411 - DNA, 227 bp, Homo sapiens
tcaccacccactgctccttaccctacttcctgagcagggaactctaataactacaaaaccagcctagaaagatactactgctatggttgaagagtgacaataggaatcacactgcgattactttataaaagcagcacacacaaaatgttaggaggtaccaatgccaagttttagctgtctaaaaacttatatttctgaatcagatgatagacactggagaagaaaaa

SEQ ID NO: 412 - DNA, 3459 bp, Homo sapiens
cggattattttctatttttagtacagaccaggtttctccatgttggtcagactggtctcaaactccctacctcaagtgatctgcccacctcggcctcccaaagtgctgggattaaaggcgtgagtcaccacccctggccttatagtttatcttctagtggtcttctatcctcatttgaaaatgtgaaaagtgggtacctgagataattcaccgactcattgtttcttggaaccacaattgatctcagaagtgtaaccctgtactactgagaagcttaatcaaggacaaatacaatcccctcactccacagatggctgacatgatggtctgtgacctgaaagttgttgaatagttggagtgttctgcattcatgtggaagaggctaaaggatgtttgatgaagcactatgggctgccctggaagaggactgaagaagcagctgcaggtgagtgctgctctgaacataatccaggacactttgtacatagttggtggttctgtcacacttaaagcaatgttaatttctttatttttatttttttagaatcaaggtctctgttgcccaggctagagggcagtggtgcaatcacacctcactgcagcctcaacatcccaggctcaggtgattctcccaccccagtcttcccagtagctgggattaccagtgcatgccactatgcctggcttttttttttttttttttttaattttaaattaacttttttttttttttttttttttgagacagagtctctctctctctctctcccacccaggacagagggcagtggcgcaatctgggctcactgcaaccttcacctctcaggttcaagcgattcttgtgcctttgcctcccaagtagctgggaccacaggcatgtgccacgacacctgactaatttttgtatttttagtagagacagggttttgccatgttgggcaggctggtctcaaactcctggccttaagcgacctacccgtctcggcctcccaaagtgctgggattacaggcatgagccaccatgcccggccctctttttttttttttttttcctgagacggagtctcgctcttttgcccaggctgtagtgcagtggcgtggtctcggctcactgcaacctccgcctcccgggttcaagcaattctcctgcctcagcctcctgagtagctgggattacaggtgcctgccgccacgcccgggctaattttttgtatttttagtagagactgggtttcatcatattggccatgctggtctcaaactcctgacctcattatctgcccaccttggcctcccaaagtgctgggattacaggcttgagccaccgcgcctggcccattttttaatttttgtagagattgggtctcactatgctgcccaggttggtgttgagctcctgggtgcaagcaatcctcttgccttgacctcccaaagatctggaattataggcatgaacctccatgcctggcctaaaagcaatgtttaaatccaattaaaaattaaaatttgtttttgtagttgtagaggaactgttccgtgctggttccccaatagcctaggacaactctgttagccttgacaaatttggcatccaacctgagcctggtaaggtcacgaagcctttttggaagaaagagggatgtgggccaggttaagggctgtgataagactccctgggatcttgtagtgcatgttcttgcctaagcagtgaattgggaggattcagtttcctcccagtgtcctagttgttactagacagtgtgggctgggttagatgaaatggaaaagatttccctgggtctgatagtacatgctacccatcagtgaatatttagagatttggaggctgggcttggtggctcaagcctgtaatcctagcactttgggaggctgaggcgggcagatctgttgagctcaggagtttgacgcaagcctgagcaacatggcaaaaccctatgtctatatatttttttttttttgagatggagttttgctcttgttgcccaggctggagtgcaatggcgcgatctcggctcactgcaacctctgcctcccaggttcaagtgattctcctgcctcaggctcccgagtagctgcgattacagacatgcaccaccatgcccagctaattttgtatttttagtagagatggggtttctccatgttggtcaggctggtctcgaactctcaacctcaggtgatccgcctgcctccgcctcccaaaatgctggaattacaggtatgagccaccgcatccggcctacaaaagattttttaaaaaattagctgggtgtagtggcacacatctgtggtctcagctacttggaaggctgaggtgggaggattgcgtgagcccaggaggttgaggttgcagtgagtcgaaatcgcacgactgcactctagcctgggcaacagagcgatacacgacagagcaatacactgtctcataaaaacaaaacaaaaacaaaaacaacaaaactcaaacagcaagagatttacagtggtaggattgaagcagctgcctgaatggtgtcttagttgtaaaagtttgtagatgcttggctgggcgccatacactttgggaggccgaggtgagtggatctcctgagatcaggatttcgagaccagcctgcccaacatggagaaaccccgtctctactaaaaatacaaaaagttagccaggcgtggtggtgggcgactgtaatcccagctactcgggaggctgaggtatgagaattccttgaacctgggaggcggaggttgcagtgagacgaggtcacgccactgcactccagcctgcgtgacaagagcaaaactctgtctcaaaagaaaagaagaaaaaaagtttgtagatgctgagcagaaggcaacttaaatctgaaagtaagtccaaaactgtgcttattggtgtggaactgctcctgtcacacccccgatctcttcctctctcttaccctgacctctgttcctttaaggaaagaaacgtccactctgctccagtcaaccccactgctggtgtcctctgcactgccttgcactccctgaagagagcctgggcaacagagcgagactccatctcaaaaaaaaaaaaaaaaaaaattggggactatgtatatagatttactacactgaagccctccagcagtctaagaactgatgcctctaacgaaggaaaggactgcatgtttctgatgaagctaccatgacctaccagatttccaacgcctgccaaaattaatctatttgtctgtggtagaagaggccataccattgtggcccttgaaacttactgtatgatgttttatttagtgaacagttcacatacccaaatggttgtaactgatactgctgaatatattgtaagaacagaagtgttaagtatgtataacacttcttttgattgtaaggaatgttcccagtggggaaatgccataattaaaacagtgatcgtgggatgaa

SEQ ID NO: 413 - DNA, 566 bp, Homo sapiens
gaggctgaggcaggaaaatcacttgaacccaggaggcggaggttgaagtgagccgagatcacaccactgcactccagcctgggcaacagagcaagactctgtctccaaaaataacaaaaaataaatacatgccttcctttctactgctgcacaacctcactgtgtcaggcaggtgagtggaccccagttaggttctataacacctgggcgagggtttttagtatggtaataagacttagccacattttgtatccatctcaggcatctctggatccagctggtttttgttttgctgaggctcagcttcttcctggaactttttgaaacaacactcaagggtctcaagtgggtattttttcatgttgtatacccaaaaacctgaaaacccagggccctgggttacagtatttccacgtcgtatacccaaaaacctgaaaacctggggaccctgggttccagtatttcctggcgatcttacccactaccaccatctagtcaatttgaaccacctcctcaaccacctatgagggcctaaacactctttcactccctttcctgccagcacc

SEQ ID NO: 414 - DNA, 492 bp, Homo sapiens
ataatagtaaaacagtacaggatgccagaaggaagggaggagaggggataatactactatactgatgaagtagctagaagaaagaggagtgcttaaggaaactatccagcaggctattcagactgacctctcatttggaacagttctaatgagccttttcagctacaagtgatggtgactgacagttacactgattggagcctgtggcaataggcagtaagtgccatttagggttttgggcacagcatttgcctgacaccgctgcctggtatactccatttaagcagcaattgttggcttgttagtgagtgcttttggacacttagacactaacaaagaaagcatcagcaggtattgttatattctgacatgtccattcttggatggatcaaaaatgaaaacatcaacaaagaaggtaatgctcagcgagcatccattatttaatggaaatggtatatccaagaaagaagtaaactggacatattattatta

SEQ ID NO: 415 - DNA, 7703 bp, Homo sapiens
ggtgtgatgcccaacaaggagacggagttcctgctgattcagatctttggacgcaaaagctaccccatgctcaagttggtgcgcctgaagctgtggttccctcgattcatgaacgtcaaccccttcccagtgccccgggacctgccccaggaccctgtggagctggccatgtttggcctgcggcacatggagcctgaccttagtgccagggtcaccatctaccaggtatccgcccttgtctacagcgtcagctgccaccccaggccaggctcccgccattcctcccctgggctccccttctctcactctagtgattgtggtgaatcaagttcttttttgagacagggtcttgctctgttgcccaggctggagtgtggtggcactatctcggctcactgcagcctctgcctcccaggctcaagcgatctttccacctcagcctcctgagtagctgggactccagtcacacaccactatgcctggctaattaaaaaaactgtttttttttttcagagacagggtctcactatattgcccaggctggccttgaactcctgggctcaagcaatcctcctgcctcggcctcccaaagtgctgggattacaggcatgaggcactgtgcctggccgtgaattgagttctgattctctggctgagtcccctggtaggttcccatggtccttactgctagcacagcttgagtgacctctgcttcagtccgttcaggctgctctaacaaaatctcttagcttgggtcattgatgaacaacaaaaatttattgctcacagttctagaggctgggaagtccaagatcaaggtgccaccagatctaggtctggtgagggtttgctctctgcttcaaagatgacaccttgctgtgtcctcacataatataaggggcaaacaagcccctcagacctcttcatattttttttgagacaaggtctggctctgttgcccaggctggagcgcagtagcactatcttggctcacggcaaattccacctcccaggctgaagccatcctttcacctcagcctcccaagtagctgggactacagtcgtacaccaccacgcccggctaatttttgtatttcttgtagaaatggggttccaccatgttgcccaggctggtctcaaactcgtgagctcaagcgatccacccaccttagcctcccaaagtactgggattgcaagcatgagccaccatgcctggccccctcagacctttgtttgtttgttttttttttgagatggagtctcgctctgtcgccaggctggagtgctgtggcgccatctcagctcactgcaactctgactcccgggttcaagcgattctcctgcctcagcctcccaagtagctgggattacaggcatgcaccaccaggcccagctaatttttgtatttttagtagaaacggggttttaccatgttggccaggctggtcttgatctcctgacctcatgatctgcccacctcggcctcccaaagtgctgggattacacgcgtgagccactgtgcccggccaagaccttttttataaggggactaatctcattcatgaaggcagagcccttatgatctaagtgcctctcctctcaaaggcctgacctcttaatcctattgcattgtagatagattgcaacatatgaatttcagggggccataaacattcagaccatagcaccctcccatccttctcccaacacttgctacattctaggcatcttccttattttctgtgccaattctcaccacagggctttgcgttctctgttccttctgccaggaacactgttccccatggacttcatgttattccggtctcagctccactgttcctaatcaggatgcccttcctgacctccctggccaaggcaccaccccttcaccgtgcttggcttggttcctcattcaccatgactcagtctccctcctgtctcccaaggctgagcacaggatttggtgcaaagctgacacttggcagtggtttgttgaatgactgagtggagtaacaccctcaactcagtgtcctgggagcccccactcatgccagatcacacaagggatccaaagagagcccctcacagcacttgtcatgtggtcctggacagataacagtttccttaagagccagtggttctgagatggagaagcccggggtgctgtgggagccgagtgggcaggtggggcttcctgggggaggtaaggagagcagaggacgctgggcagagggagcagtgtgtaccaggaaatgcggtgcagtgagtgggggcacctgattaaagagcttgatctcaaacctcttggttggtggggagagctatgccgggggtgggggggcagagatttaagaagaaggaatcgggttggaatcatgtttctggaagaatctgcaattggaaacgtgtctcctggcagccgtgtggatgctgttggatggggagaggggctaggggaccagggtcgtgggtccaggtgagagatggcttgagaccagcagcagaatgtgggggggagggttgtttttagttcatttcttcattttgcaaagcaatgcactaaaaagccaaacagcatgtaaaagcacacagtgacgagtcctctgcttctacccaggccccgtgcgctgcccctgacgccgcccgtctccctccccagaggtgactatttccatgtctccttccagagaggttctatacatttgcaagcagatctctctctctctctctctttttttttttggcatctgtatcctttgtatttaaatatccttctcccccgtcttatggagtaaaatacagccaggcacagtggctcatgcctgtaatcccagcactttgggaggctgaggcagatggattgcttgagcccaggagttcgagaccagcctgggcaacatggcaagaccccatctctaccaaaaaaatacgaaaattagctgggagtggtggtgcacacctgtagccccagctactcaggaggctgaggcaggagggtggcttgaactcaggaagtcaagtctgtagtgagccgtgatcataccactgcacaccagactgggtgacagagcaagatcctgtctgtttaaaaaaaagaagttctttagccaggcatggtggcttacgcctgtaatcccagcactttggaaggccgaggcaggcagatcaccagaggttgggagttcgagaccagcctgaccaacatggagaaacctcgtctctactaaaaatacaaaaagaattatccaggcatggtggtgcatgcctgtaatcctagctacttgcgagggtgaggcaggagaatcacttgaacccaggaggtggaggttgcagtgagccgagatcgcgccattgcactccagcctgggcaacaagagcgaaactccatctcaaaaaaaaaaaagtttctttagtagcagggcattatatacatgtaccttgccttttacaaatttcatttaatacaactagaagtcactgatccatctcaaatttttttgttgtttttttgagacagagccttgctctgtcgcccatgctggagtgcagtggcacaatctcggctcactacaacctcctcctcccaggttcaagcaattcttgtgcctcagcctcccatgtagcagggactacaggcgtgtgccaccacgcctggctaatttttgtatttctagtagagacggggtttcaccatgttggccaggctggtcttgaactcctggcctcaagtgatccaccaccctcggcctcccaaagtgctgggattacaggcatgagccactgcgcccggcctgctcatctcaattttttttaacttgaaaggatgaatgatatatgttctaatagctgtccactgttttgtttcaaaagcaagtgcattttgttaaaaaaaaaaaaactttgtcagcggggcgcagtggcttatgcctgtaatcccaatgctttgggaggctgaggcaggtggatcacctgaggttgggagtttgagaccagcctgaccaacatggagaaaccctgtctctactaaaaatacagacattagccagacgtggtggtgcatgcctgtaatcccagctactcgggaggctgaggcagcagaatcacttgaacccaggaggtggaggttgcggtgagctgagatcaagccccattgcactccagcctaggcaacaagagcgaaactctgtcccaaaaaaaaaaaaaaaaaattgtctagtgtttttgaattatgttcaaggtataaaattttaaaagataaaaaaggtattccttcccaccctgtcctccacagaggtgaaagctatcatttgcttctagtgtctccttcctgggatattctgtatatgtgaagttatttttctttttttaattcacaagcactgagcacttattatttgccagggactgtgctacatattttacaaccacccaaagttaggttcatgcccataatcctagtgctttgggaggccaaggcaggcggatcacctgaggccaggaatttgagaccagccaggccaacatagcaaaaccctatctctactaaaaatacaaaaaattagccgggcatggtggcaggcgcctgtagtcccagctacttgggaggccgacgcaggagaatcgcttgaacccaggaggcggaggctatagtgagccgagatcatgccattgcactccagcctgggtaatgagcaaaactccatttcaaaaattaaaaaaataaaattagccaggcatagtggtgtgcacctgtagacccagctacttgggagactgaggtaggaagatcacttgagcccaggagttcaaggctacagtgagctatgatcatgccaccattctccagcatggatgacagagagggagacccccatccctaaaaaaaaaaaaaaaatcggaattaagtgctgttatcatccctattgtgcatctggagaaactgaggcacacaggtacagtgacttggccaaggtcacacagcttgtgacagagccaggattttgacaaaggtgggctggttctagggtagttccctcagggtgagcatcctaaagattggtggttattgccaaatgggacagagggaggaggggacaggttggagggccgtgtaccagatccaggagaggtgtcctgaattccctggtatccccctttctgtttctctgtccccagttcctctgtaggggattgggggttacaagattatatccctactctcccttgcaggttcctttgcccaaagactcaacaggtgcagcagatcccccccagccccacatcgtaggtaagtccgagagcatgggggcagccaagtctctaaccttacccaggccctgccaggttctcgctgggcctaggctgggctccctgggcctctgggccgagtcccttgcagggcacagggcatgtatgtctccacaccaggaatccagagtcccgatcagcaggccgccctggcccgccacaatccagcccggcctgtctttgttgagggccccttctccctgtggctccgcaacaagtgtgtgtattaccacatcctcagagctgacttgctgcccccggaggagagggtgagggcttaaagcaaagcatgtgttggggctggggagtgggctggcactaccctgagggtgcatgggagaggctggaggagggagaccgagagagccctggcctctgaccccgcctgcactccccaccttggagtaggaagtggaagagacgccggaggagtggaacctctactacccgatgcagctggacctggagtatgtgaggagtggctgggacaactacgagtttgacatcaatgaaggtaaaaactgggccaggtgcggtggctcacatgtgtgctcgtaatcccagccctcctacaggctgaggtgggaggatcacttgagcccaggagttgaggttgcagtgaactattatagagccactgcactccagcctacatgatagaccctgtgtcaaaaaaaaaaaaaaaaaaggcaaaaacctggacaggcaggacttccaaacattccaaacaccacccaggatgaggggcggcctctggggtcaaggggtaggcccaggctgagacgcagtccacttacaccctcgtcctccggccgcacacactcatttgccccaggggctccagacctgaggtcacccagccctgttggcccttgttcattccctccctcctacaactctgtgctggctactgggtgtcaccaggacaaacctagtccctcgagtcagcaagggaacaggcaaattacactttggggagcttaggagaggagcatgccttgagtggggggtcaggaggccttcctggcagaatacagaaaaaccaggagtcatcgcccgggtgaagtgtggagtgggcagcctaggcagcggggctagcttgtgcaaaggtttggaggcacaagaaagtggaaggaagccgggcacagtggctcacgcctgtaatcccagcactctgggaggctgaggcgggtagatcatttgaggtcaggaattcgagaccagcctggccaacatggtgaaaccccatctctactaaaaatttaaaaattagcccggcgtggtgctgtgcacctgtaatcccagctcctcgggaggccgaggcaggagaatcacttgaacctgggaggcggatgttgcagtgagccgagatctcgccactgcactccagcctgggtgacacagcgagactccgtctcaaaaaaaaaaaaaaaaaaaaaaaggaagtggaagggagtgtaaaatacctcaaaaaggtgtaggcatgggttagccgctgcagcccccactgtgcaaaccttaagggtgcatgtcttccaacagtggaggaaggccctgtcttcgccatgtgcatggcgggtgctcatgaccaggcgacgatggctaagtggatccagggcctgcaggagaccaacccaaccctggcccagatccccgtggtcttccgcctcgccgggtccacccgggagctccagacatcctctgcagggctggaggagccgcccctgcccgaggaccaccaggaagaagacgacaacctgcagcgacagcagcagggccagagctagtctgagccggcgcgagggcacgggctgtggcccgaggaggcggtggactgaaggcatgagatgccctttgagtgtacagcaaatcaatgttttcctgcttggggctctcttccctcatctctagcagtatggcatcccctccccaggatctcgggctgccagcgatgggcaggcgagacccctccagaatctgcaggcgcctctggttctccgaattcaaataaaaaggggcgggagcgctgttggttgtgcgcatgcgcagtttccattcttggtctccttttggcgccctggggcagcgagagaccgtgagaaatttctcggcggcgccgaagatgcgcgccacttccggtctggctcctaacaacgggggaggctggtaaccagggtgggggggatggcggagcgggcgctagagcccgaggcggaggcggaggctgaggcgggcgcgggcggggaggcagcagccgaggagggcgcagcgggccgaaaggcgcggggccggccgcgactcacggagtcggaccgggcccggcgacggctcgagtcccggaagaagtacgacgtgcggcgcgtgtacctgggcgaggcgcacgggccctgggt

SEQ ID NO: 416 - DNA, 464 bp, Homo sapiens
cggccgccacgggtgagggggcctggccccgagggagggagggaggagacgcccccagaccccgccgggctttaccccgccccctccgcttctagggccagcccccggcacctgcggaccccgcccaggagccgggccggcggcctgggtctcgtactgcctggccgggacgcgcctggctcgtggccccgcctcccatcgttccgactgcccaatcctagggtgcacccagcccctcgacccgccttctgagcgcttggccccgcccgctagaactctggcggcccaatcctgggactggccccacctccaggccttgtaactaaccaggccctgggggggcagccccgccccctcaccggtctcatcctcccccgcttagttccccacctggcctgggactctggacaccctggggcactcagccctgcccttcttgaagttctggtgccccatctgggact

SEQ ID NO: 417 - DNA, 961 bp, Homo sapiens
aacatgtggaccaggaatatgggacccctgaaaacaatatctgcgttggtgttctctaaatattttcaggcatgtctctttcttctgatattttatttctatttaatgtttaagtattttactataattaggtaactttccatttcctggttattgtaccaattaccgtaacattattaatatattaaattaacatgatgttttccaaaatgtaaattaaactgagagcagaagtgacaaagccctgacataaaacagtgaagcagtgctcttgtttttaccacacaaaggccaattgttttaatctgctgacccacccatgggtgtaaaataagaaacattcactaaatcaagagccacatgcaaactgccaggagctctgctctgctcagggaagataccacatcctagagagcatttgtaagtagtgatttaaatttatggaaatctgcattcattttatagtgtatctggttttggtagaggccagataggttaagtggataggcatataaaaagactaccatcccctgcaactttcaagtgttttgtcatggtagtgatcaattccattccttggagaatgtgattattatttttcaatcattgttgccagtggaggagaatttcacaggcttccccttggttctgctctaataatgtccctgactctacaggtcaggaagaaagtgagagtcctgccagctgccatgtgtgtccattacacattcaagaagaggcaataacggcaaactgattagatccaccttgggatggacatgagtcaaaactctaggtagcatctgaccttcaaaactccctctgcaggctgggtatgatggctcatgcccgcagtccccgcacttttggaggcggaggtgggaatatctcttgaggcccagagttgcagaccaccttgggctacacagtgacagcctgtctgtacaaaaactaaaaaaca

SEQ ID NO: 418 - DNA, 394 bp, Homo sapiens
ttccaagtccatttcctggaggtaaacattccttggtgggtgtgctttggtctgcaaattgactgtcaattctcagaagagatctgtcttgctgcacatagttagaagaacgtgccctgcagggaatgtctagtgagtgggggtgaaaggttatatttgcatttatgaagggctaagcaggaaacagggaacaaaaggaaaggggagataagagaaaataataataaaaaaatagtaactcattccctgtttcttagaaaaaatggggcactctgttacaaacccaggaattcaaggctgtagtgagttatgatttgccactgtactacatacctcctaagtgaaggattgagactgtgtatctaaaaaacccaaatgcaaataacacacacac

SEQ ID NO: 419 - DNA, 1240 bp, Homo sapiens
gcgagttcatctaactatgtgctccacgagggatctctccttgagacttgacagttgatttgcagacaaaagtatgccctcatggaactctcacctccaggggttccccttagacctcacatccattaggaggggatgtggaaaggatgcccacgtggccacttttacaactgctgtcctgctcatttccttccctactttataaaacgttcactttctgctccaaagatgaagtgtcacgttggaaggcaggatgctttgtgccccttccagcaagctaacttccaaataaattctctatttttatatcagaccttgttcttgttaattagactttacatgaagtgagcaactaagcttttctgttacaagacttcatgcccacagatacattcaagtcccaggtggaaggatgatctagatcaggcaaggtgctgaccatgggaacaggagacagtcaagggaatctgaggaagcacatgtttgtgtccaatatagtcccctccttgtgccactcagatgtgctcatgccctccaactgtggctggttttataagcagatgccttgtgtagttgcacggggtcttgtgcttgaggggctttttgcttggattaatgttctgcacttgcatttttatttttcagacagcggataatcctccactgaagagggaatagttctgcagtaattccctaggggtttgctttctcctctcctacgggcttgatggagacaggcacagagtcctatgatgcccacgttgcatgcctctagcagctttgaattctgctggatcatctggcacaatgggccgagcaggttgggccagaccctgtatctgctgtagagatattatatgttctggattccacttgaaaccaggagtctttgcattcattctgtaacccatctggttttggcagaggctaggtaggttaactgaacagggatttaaaaaggactttattaacacatcagagcaatatcctctactgtggtatttttggactccaaaatccctagaggctcaataaacgccgtgcttctcttttagtgataggaagtatataggaagccatttaccttaaacaggatgtttctgctcggcatggtggttcacgcctgtaataccagcactttgggagaccaacgcaggcagatcactggaggccaggagtttgagactagcctgagcaacatggtgaaaccccatctctacttaaaaaaaaatacaaaaaa

SEQ ID NO: 420 - DNA, 340 bp, Homo sapiens
acttgggtctttccatagggatagctgagtgtcctcatgatgtggcccctggcttcccctgaagcaaatgatccaagagagcacaggtggagccatgatgtcttttattaactagtctcagaagtcacactgcatcatttggcaccatcttattgagttacacaggtcagccctgctccctatggaaagagacagagggtgttagatgcccagaggtgaacctcactgggtaccatcctgcaggtgggctgccactctgctcaatccaaatcacagctctcccgtttctcacctcccaacagttgctgttcctcaggccaaagttcacattctgcacagc

SEQ ID NO: 421 - DNA, 448 bp, Homo sapiens
ggcctcactggatttggagaatattattgattaaattgcatcttccccaaaaaagatacgttgtagtcctaacccccaatagctcagaatgtggccttatttggaaatagggtctttgcagatgcaatgaagatataagttaaaatgagatcacactagagtaactgggcccttaatccaatatgacatgtccttatcagaagaggagaagacacacacacagggagaagatgaccatgtgacaacaggggcagagatcacagggatgcctctactagacaaggcacaccagaaattgcttgccaacaaacaccagaaattagaagaggcaagaaacaactccccacacacaacccacccctgcaggtttcagaagaagcatggctctgccaacaccttgattttggatttccagcttccacaactatgagacaataagtttctgttg

SEQ ID NO: 422 - DNA, 772 bp, Homo sapiens
gcttgaaatggcgtcttctgatgaacactcatccatccttcaaggtctactctctcatcacagcttgtgactcttccactttttgaactggtgtttcccattcccagttcacagagccctttctcattgaactatttatctgagttccctctgccggaacatgagccatgcctagagtagccacctagtagtgagtgacagctctgtgctggatgcacataaatggtctcccttaactgccatgagccctaaagaaggtttgctacagctattttacagatggggaaaactgacagagagatattaatgaattgcccacatgcaaatatgtgctgagtcttggatttgcatctttatcgtgactccacggagacccaccctctaagaccagagccagtgtcctattcatcttttgtctctgcagcgttcagcatggcactgtcttggcttacaaaatctgctctatgcttgctgactgctgaatgaatgaatgaatgaataggtagtcacaaagaatgtttagaatgtttctcagacaggctgagaaaaaacacaacgaaacattatttccgtttggaaagtttttttatttttgtgttcagtactgaagtaaaacaaaaatctgaataacagctgcaccgttaaaaatgaaattaccaatatatgaactctaggcatcatgcatatataattttttgtagataacttttcttctcattttccttctcattctcttcatctttttctttttgtttgagcaaaaaaaaaagaa

SEQ ID NO: 423 - DNA, 453 bp, Homo sapiens
tgaagagactcagatgatcaagtgaagagccccagattccccctaagaagcaaaggatcgtcttttatgcctctggctaaggcaggttcttccatgactcctaagagagttgtaaaaatagaggcttggcttgaatgtacatagatggtacctggcatggactgatgtttttaggcacagaagttggagaagagatttcatgaaagacaacatcactgcattgagagaatagttgttaatttgtttagaatttaagttctactcagaatcataacatctggcagaacagcccaaacccacattccaaagtggtaggctcatttgtttctagagatttcatcatgtcgcttttccttcatcatgatctaaataaaggcagatatgtaaaatttctcaccattttggtggggtaagataagctattattaagatttaatccttataccatgttgg

SEQ ID NO: 424 - DNA, 1229 bp, Homo sapiens
cctatcagttgctcctcaggaatcttctggtacaggttaacatcagcattttcattttgtatccagggaaaagcacccagaggtcatctgtgtgtcccgagaccctccagctttttcttagctgatgaaatatgagtcctcagcttggttcccagcctgctgattgacttgggctgctggtgccttgagtcccacagatgattcattaggaaaagccagatgtaccaaagcggtttactcagagtcaggggtgtagctctggctgcctgtcagctcccttggatactatattgtatgatttcttcctttcccactaatatgcacatccagaaaaatttccatctgagattctagtacttcaaaatcatgcatagtaaatgagaaagctttaagtagagggcagttaaacagtgacatgttgagcacctggaggaaaaaaaaaggtgcagtttttaataagagagaaaatgaaattatctttgataaatttttgtttgttttgctttcagcattgtgccatgagggatttggacaatatttaagaacttcttgtcctagatcagccccaatctgtttaatcaaaatggaaggttcagtaatttcatgggaaaccttggtttttcattaagtgctaccaactttcaagtgaatcttgtatttgatttcctaaaatcatgtcttgaaaacatgttttctcatgaaacttgaatactatctcaaataggaatataaacctggagtcaacaagcttaggcagcattgatttaggtcactttcccagtgaggaaaatttctgtgttttcagaatttccatttctactaacctcttggagaaaaagaaattgaattagaggtaaatagaagacgtcactgtggctgcttctggaagtgctggaagcatcaccccaattggctccaaatactgtcatgttttcttgcacactgacttctggtttccactgtatcagtatgtacctttgtaattgttatttttatgtcttttatgcccttgattattagttgggctcttcataaacagaggccatctctactactgtttatttttccctgctgtgcccagaacattggcgtagacacagtaagaacctagtaaatattactgtttctagccatcagggagattgtggaactcctcccagtataatttttacaaactccaagcaaatctgacccaaactcccaaattgtcaagtcctgcttaactttct

SEQ ID NO: 425 - DNA, 3497 bp, Homo sapiens
gctttttaaagacagaaagctcatggtgcaaattgttatttccaggtaagtacattttgagattttaaaatttggcttgaaatgatgagggctatagaggtgtgccatgtgtctggaagaatcagggtccttaggtgcatcttgtacaaatccttgcattctgatctctagttccatgcctagcactgcccaatttcccaagaacttgacatccaacaaagaggtcctttgggcctcaaatggtggtgtgaggacactattcatccttcacccctcaaaaatattgtaaccgccagccctttgcttgcagtgcgagggctggaggcctggcagaatgggtgctgatggagctacagggggagatcgaggctcgctacagcactggattagctggaaacctcctgggagacctacattacaccactgaggtgagggggcttttctttccctgcctaatgcctcaggaaagcaagctacaccaaggtggtgctcccaggacccagagtgaggactgcctcaggtttgttattcaaggcctagctaatctgcgatgctctctgcttgttctccccctacctctgcagtagcagggaaatttaattttggggaatctggaaagctcacatttctgaaagtggaaattctcctatgtggggctagaaagtaaaaagggcacatgggtgggtggtccagtgtggctgctcaacaatggcagagccagaccagggattggaggtgccagcatagcctgccaagagcagctttaggaggcgcctgagtgttatggccttgccccggaacctcaggaatctcgttcttgttctgccaaagggaatccctgtgctgatcgtggggcatcatatcctgtatgggaaaatcatccacctggagaaaccttttgcagtccttgtcaaacacactcctggggatcaggactgtgatgagcttggccgcgagactggcacccggtacctggtgacagcactcatcaaagacaagatccttttcaaaacccgccccaagcccattatcaccagcgtccccaagaaagtatgaaagaacctcggattttccctagagagcggccaactccttggactcgtgctccgctgccacctcgaggacggctcgacggttccctgggaccacaggggggtcctgttctgaacacaggccacccactgggtgtgaactcggatcccttccttatggcggccggttctcttggtggaaatctgaccccatttccaaggaacccatctccttttccagcttcatcaggctcattggcttcaaatccagcacctttcccggctggtgctcgtgacccaagtatggcttcttttccaagagggatgaatcccactggcacaggtgcagtttctttcccaaggcctggtggcctcttggggccaggcccaggcccaggccccaccctaaaccctaggacaggggctctgccaggcccagggcctctgtctaaccccaggttagggggtctcccaggaccaggtcctatgtccaacccaagggcaggtggtctcctgggagcaggtcctgaccccagaggtggtggtcccatgggccctggatctggacctaacctgagagccggtgttctgttaacctctgggaatggtcctcccaatcctaggccagttggcctgggcccaggaccaaaccccaatctgagatcaggctttttagggacaaaccctgcccccaggtcaggtgtgtttccaggcccaggccttgggcccaacccaagaccaagtggcctgggcccaggccctaatctagatgccagagcaggtggcctcttgggcacaggatctggtcttaacttaagaatggctggacctcaaggcctcgatcttgcccccattctaagagcagcaggtcttttaggagcaaattcagcttctttctcacaggcttctggaaacatgggcacaagcccatcctccatggcaagagtacctggccccatgggcccaaactcgggtcctagctctcggggaattggccttccagggccaaatccatctcccatgtcaaggctcctggccccataggccctaattcagctcatttctcaaggccagttggccccatgggggtaaatgccaatctttcccaggggagcaggttcatctgccttttctcagtcttctggcacattggcatcaaacccagctaccttccaaaggtccgctggcctccagggctcaaatccaaccattttcccaagagcctctgggccacttggccccaacccagctaacttcccaagggccactggcctgcagggtccaagtccaactaccttcccaaggtctactggcccattaggccctggtcaagttactttccccaggccagctgccgggcatctgggcccttctccagctggccctgtgggtatcaacccagctcctttcacaaggccaactgggaccctgggtctcaacccagcttcctttccaaggatgaatggccctgcaggcaagagtttcgtcccatttcctagagtggggagcctccctggcacaaacccagctgctttccccagaccagggggtccaatggctgcaatgtacccaaatggaatgttgcccccttaaacaccattttccctccaggaccaccttggtttctaggcactgtggttcttggcaggggctgtcttaggtaaaagggtagttgtggagctacagtctgaagaacatagcttgggctcaagttcaaatgagccatctttttcctttgcgtttttcttgactgaaggtgagatgttatttgtggcatgtgaactgtggcaggtgggaataatcctgcccttgagagaaaggatctccagcctcccagaagcctgctgtgctttcgtcccacagctttctgcccattgtttcttactagtttcttgaattgttcttgtggacttttcctcagggatacattggcctgcaggtcccagttcacatgtagtcccctgctcaccattggagaatcagctcactgctctctagaaacgtggcgttggtgaacggaccatgcttccgtagctctgacctgggcagcttggacctggtcatcctctactgccatacctttccctgggggcttgaacacagaacagggagatggacaaccacttcaaagaaagacccaccgaatgcagtttctgcttgactgactgggcctgcagctcccttctcctgggacttagaggtggccagatttaaggcccctctactcatccaactccctcttcactggtactcccaatcaatcaaagaacctcaaaatttaaactgatgtggatgggaatatgggaattagggtgggggtgggggatgaagggaagaaatcactgtgctttgttcggcctggtgtgcaaggatggttggtggttttcctgcattgtatcttttcttactgtttctttaataaatgggatgagagggctgctggtgtcactgtgttttgttacctgt

SEQ ID NO: 426 - DNA, 3500 bp, Homo sapiens
gctttttaaagacagaaagctcatggtgcaaattgttatttccaggtaagtacattttgagattttaaaatttggcttgaaatgatgagggctatagaggtgtgccatgtgtctggaagaatcagggtccttaggtgcatcttgtacaaatccttgcattctgatctctagttccatgcctagcactgcccaatttcccaagaacttgacatccaacaaagaggtcctttgggcctcaaatggtggtgtgaggacactattcatccttcacccctcaaaaatattgtaaccgccagccctttgcttgcagtgcgagggctggaggcctggcagaatgggtgctgatggagctacagggggagatcgaggctcgctacagcactggattagctggaaacctcctgggagacctacattacaccactgaggtgagggggcttttctttccctgcctaatgcctcaggaaagcaagctacaccaaggtggtgctcccaggacccagagtgaggactgcctcaggtttgttattcaaggcctagctaatctgcgatgctctctgcttgttctccccctacctctgcagtagcagggaaatttaattttggggaatctggaaagctcacatttctgaaagtggaaattctcctatgtggggctagaaagtaaaaagggcacatgggtgggtggtccagtgtggctgctcaacaatggcagagccagaccagggattggaggtgccagcatagcctgccaagagcagctttaggaggcgcctgagtgttatggccttgccccggaacctcaggaatctcgttcttgttctgccaaagggaatccctgtgctgatcgtggggcatcatatcctgtatgggaaaatcatccacctggagaaaccttttgcagtccttgtcaaacacactcctggggatcaggactgtgatgagcttggccgcgagactggcacccggtacctggtgacagcactcatcaaagacaagatccttttcaaaacccgccccaagcccattatcaccagcgtccccaagaaagtatgaaagaacctcggattttccctagagagcggccaactccttggactcgtgctccgctgccacctcgaggacggctcgacggttccctgggaccacaggggggtcctgttctgaacacaggccacccactgggtgtgaactcggatcccttccttatggcggccggttctcttggtggaaatctgaccccatttccaaggaacccatctccttttccagcttcatcaggctcattggcttcaaatccagcacctttcccggctggtgctcgtgacccaagtatggcttcttttccaagagggatgaatcccactggcacaggtgcagtttctttcccaaggcctggtggcctcttggggccaggcccaggcccaggccccaccctaaaccctaggacaggggctctgccaggcccagggcctctgtctaaccccaggttagggggtctcccaggaccaggtcctatgtccaacccaagggcaggtggtctcctgggagcaggtcctgaccccagaggtggtggtcccatgggccctggatctggacctaacctgagagccggtgttctgttaacctctgggaatggtcctcccaatcctaggccagttggcctgggcccaggaccaaaccccaatctgagatcaggctttttagggacaaaccctgcccccaggtcaggtgtgtttccaggcccaggccttgggcccaacccaagaccaagtggcctgggcccaggccctaatctagatgccagagcaggtggcctcttgggcacaggatctggtcttaacttaagaatggctggacctcaaggcctcgatcttgcccccattctaagagcagcaggtcttttaggagcaaattcagcttctttctcacaggcttctggaaacatgggcacaagcccatcctccatggcaagagtacctggccccatgggcccaaactcgggtcctagctctcggggaattggccttccagggccaaatccatctcccatgtcaagggctcctggccccataggccctaattcagctcatttctcaaggccagttggccccatgggggtaaatgccaatccctttcccaggggagcaggttcatctgccttttctcagtcttctggcacattggcatcaaacccagctaccttccaaaggtccgctggcctccagggctcaaatccaaccattttcccaagagcctctgggccacttggccccaacccagctaacttcccaagggccactggcctgcagggtccaagtccaactaccttcccaaggtctactggcccattaggccctggtcaagttactttccccaggccagctgccgggcatctgggcccttctccagctggccctgtgggtatcaacccagctcctttcacaaggccaactgggaccctgggtctcaacccagcttcctttccaaggatgaatggccctgcaggcaagagtttcgtcccatttcctagagtggggagcctccctggcacaaacccagctgctttccccagaccagggggtccaatggctgcaatgtacccaaatggaatgttgcccccttaaacaccattttccctccaggaccaccttggtttctaggcactgtggttcttggcaggggctgtcttaggtaaaagggtagttgtggagctacagtctgaagaacatagcttgggctcaagttcaaatgagccatctttttcctttgcgtttttcttgactgaaggtgagatgttatttgtggcatgtgaactgtggcaggtgggaataatcctgcccttgagagaaaggatctccagcctcccagaagcctgctgtgctttcgtcccacagctttctgcccattgtttcttactagtttcttgaattgttcttgtggacttttcctcagggatacattggcctgcaggtcccagttcacatgtagtcccctgctcaccattggagaatcagctcactgctctctagaaacgtggcgttggtgaacggaccatgcttccgtagctctgacctgggcagcttggacctggtcatcctctactgccatacctttccctgggggcttgaacacagaacagggagatggacaaccacttcaaagaaagacccaccgaatgcagtttctgcttgactgactgggcctgcagctcccttctcctgggacttagaggtggccagatttaaggcccctctactcatccaactccctcttcactggtactcccaatcaatcaaagaacctcaaaatttaaactgatgtggatgggaatatgggaattagggtgggggtgggggatgaagggaagaaatcactgtgctttgttcggcctggtgtgcaaggatggttggtggttttcctgcattgtatcttttcttactgtttctttaataaatgggatgagagggctgctggtgtcactgtgttttgttacctgt

SEQ ID NO: 427 - DNA, 298 bp, Homo sapiens
gggccgggcgcggtggctcacacctgtaatcccagcactttgggaggccaaggtgggtggatcacgaggtcaggagatcgagaccatcctggctaacatggtgaaaccccatctctactaaaaatacaaaaaaaattagccggccgtggtggcgggcacctgtagtcccagctactcgggaggctgaggcaggagaatggcatgaaccccggaggcggagcttgcagtgagctgagatcgtgccattgcactccaacctgggtgacagagtgagactccgtctcaaaaaaaaaaaaaa

SEQ ID NO: 428 - DNA, 2124 bp, Homo sapiens
tttcgagataaccggcatatgtgagaatctttattttgacaaataagtgcagtataaaaaacttgacctgaaaattaaaaaaaaaaaaaaaagcaggtaaaaataaatatgtttacaaattattgtagaaacaatacaaaagaggatttgaattctcaatgaggaaaaaccaaaatgcgtccaattgtataaaggctcttcccttgcaagaaacggggataaagctgaagacccagtttggttttgctgctgaaaaatgtacaaaataacttagaaaaaccagtcgaggtcaaacgttgtgagcccactacctgtacctgcctgtttttgatttgaggaaagttgacgaccacagtgcaaggcagagctgatggtaggacagccaggagagcctgtcatcctacattaatcttcaagtaaatgctgaagaaaaacaagcccttagcgaagtctgaactctgcacttggctgaccggatttcctccattctaatgctcaaaatagtttaacttcttggccagcagaacgattgcctggatcagctgccttagcaaatgcctgctgccttccagccttcatgggttgggtctgatgtcaaccagcagtcttaccagaaactcgaggtctgtgtgatgtggcaactgttagctacacctggaaaacccttgagttcgtgggagatgaaggaaagcaccagggtttgcccatctgtggctcagagcacaccttgcgtctttgtaggaagcacttggtacactagaggcttgccctcttgtctgctgtccaccttagtgctggttctgcacgggttagctggcccctctgagaaaggacatttggagggcaagcaagcaacccttaagtcaaaggcttagtcaggatcccaggttttaaactcaaaacgctgagaacagcctggattgcaagtcactggaaaatggcttcccctcattccccaaaagcagcagagggaaaacagccaaaaacagcctcaggaggcatgagagagaaagcaagaaccttaggatgtaggaaccagtttcatctcctagtttggtttctggaaagaagcaggcaaatgcagtgactgtcacaacttggctgtaagaattccctggagaagccactgaggagaatggatggtctcaaagataaccattttggatttgagagttcactttgggaacactgaaaagctttccattggagatgattgtcaagaacagtagcctgaaagtcacacatgctaacccggctgccaaggaatccgtccaagcagctccaagattgtagccaatttgatcagaggctcctcatagttcccatatgtgctgagaacacgcttgcctcctgctgaagcttctataagagccggggctccgccccaattgccaccttgaaaaccttacctatgatgatgagggtagaagaggtgactgcagtgatacctcaaaaaatgtggctttgaagaaagtgaagtggggagtgtgtcttagcctcagatcagagctgaatttgagaggaattcaagagtatacaggttaaaatacccaagacttcacttcttttctgaacatgttggggcttaatctttttatctccccagcagagatcacagacaagctaagaacccatctagacgtctgagcagtttccaggtggaacacccaaggcctctgtgtagcttatggcctcctttagcaccaccacaatctctttgttcctcctggcaaactttcctttttaatgtgcacttttaaaagcagttcagtgctaactccctgctggtttggctcatccctggaatgttgatgtggagtggggtatctcacataaagcaccattcctggaccctgttttctgatgcccaaagatcaggcttctgggccttgtatctcaggcgcaatcttattgcattgatgactacttaggggtggggtgggggtgacatacactaaccggcccagctcgctcagtagaaattctcctgccacctctggttgtgttcagatgggctgggagaacctccttccgcaggttgccgtcactcaggtacctatcacaagttgccactgaatgggacttaacttggtttagcacaacttctgagtgccctctggagcc

SEQ ID NO: 429 - DNA, 298 bp, Homo sapiens; identical to SEQ ID NO: 427

SEQ ID NO: 430 - DNA, 2124 bp, Homo sapiens
tttcgagataaccggcatatgtgagaatctttattttgacaaataagtgcagtataaaaaacttgacctgaaaattaaaaaaaaaaaaaaaagcaggtaaaaataaatatgtttacaaattattgtagaaacaatacaaaagaggatttgaattctcaatgaggaaaaaccaaaatgcgtccaattgtataaaggctcttcccttgcaagaaacggggataaagctgaagacccagtttggttttgctgctgaaaaatgtacaaaataacttagaaaaaccagtcgaggtcaaacgttgtgagcccactacctgtacctgcctgtttttgatttgaggaaagttgacgaccacagtgcaaggcagagctgatggtaggacagccaggagagcctgtcatcctacattaatcttcaagtaaatgctgaagaaaaacaagcccttagcgaagtctgaactctgcacttggctgaccggatttcctccattctaatgctcaaaatagtttaacttcttggccagcagaacgattgcctggatcagctgccttagcaaatgcctgctgccttccagccttcatgggttgggtctgatgtcaaccagcagtcttaccagaaactcgaggtctgtgtgatgtggcaactgttagctacacctggaaaacccttgagttcgtgggagatgaaggaaagcaccagggtttgcccatctgtggctcagagcacaccttgcgtctttgtaggaagcacttggtacactagaggcttgccctcttgtctgctgtccaccttagtgctggttctgcacgggttagctggcccctctgagaaaggacatttggagggcaagcaagcaacccttaagtcaaaggcttagtcaggatcccaggttttaaactcaaaacgctgagaacagcctggattgcaagtcactggaaaatggcttcccctcattccccaaaagcagcagagggaaaacagccaaaaacagcctcaggaggcatgagagagaaagcagaaccttaggatgtaggaaccagtttcatctcctagtttggtttctggaaagaagcaggcccaatgcagtgactgtcacaacttggctgtaagaattccctggagaagccactgaggagaatggatggtctcaaagataaccattatggatttgagagttcactttgggaacactgaaaagctttccattggagatgattgtcaagaacagtagcctgaaagtcacacatgctaacccggctgccaaggaatccgtccaagcagctccaagattgtagccaatttgatcagaggctcctcatagttcccatatgtgctgagaacacgcttgcctcctgctgaagcttctataagagccggggctccgccccaattgccaccttgaaaaccttacctatgatgatgagggtagaagaggtgactgcagtgatacctcaaaaaatgtggctttgaagaaagtgaagtggggagtgtgtcttagcctcagatcagagctgaatttgagaggaattcaagagtatacaggttaaaatacccaagacttcacttcttttctgaacatgttggggcttaatctttttatctccccagcagagatcacagacaagctaagaacccatctagacgtctgagcagtttccaggtggaacacccaaggcctctgtgtagcttatggcctcctttagcaccaccacaatctctttgttcctcctggcaaactttcctttttaatgtgcacttttaaaagcagttcagtgctaactccctgctggtttggctcatccctggaatgttgatgtggagtggggtatctcacataaagcaccattcctggaccctgttttctgatgcccaaagatcaggcttctgggccttgtatctcaggcgcaatcttattgcattgatgactacttaggggtggggtgggggtgacatacactaaccggcccagctcgctcagtagaaattctcctgccacctctggttgtgttcagatgggctgggagaacctccttccgcaggttgccgtcactcaggtacctatcacaagttgccactgaatgggacttaacttggtttagcacaacttctgagtgccctctggagcc

SEQ ID NO: 431 - DNA, 2600 bp, Homo sapiens
ggtccgcgctgtgtcccgcgctgtgtcccgccgcggccacttccgaaagcgcgcgggccggagcgagacgggcgcctcgagcgtgccaagacgctctgggcggcccagggagccgcggcgcaccccgcttgacactttggctggtggatggaggtggggaggaactcggcagcccacgggatccgcgggcaggggcggaggttagaccgtggtgagggccgacgggcgcgggttagtcgcggccaatcctgccgggcggcccggccttccgccctcatcaggactccgtagccgggccgggggcgggaggggagggggatttggttggagggaggactggctctaggtcctctcaggtgagaaggagagaaaccgtggcaagtcagggaactttctgatgggaaagctaaagtttggaggtgttcaggaagtcgcccgtgctgccggagaaaccgagactcgctcttgggacggttgcaaacagctccggagaaactcagcccgcagcacgccgcccgccgcccgccgcccgcttgtgcgcccgcaggttcctcgccgtggataatctgcccgagctgcttcgcaggcccggccgccaggcttggggatttagagccccatctgtttgcggcggacgcggcttccctaatgcgcagcaattgtgcagacccagactgtcctgcgggtcctagccaccggtgcgggtgccaagcgcctgttaaacgtttgctagtttggggttgtgttgcaatctggaatgaaggacaccagttcggtatctgcgctgggtttactttcggatcaccgagctttgcctttcttcactagagattgggtggcatctcttttattaattattaacaggccgaaacgtactggacgttaagatgagctgcttgagatgaaatctttctatataatgtgcccacagcaaattttctcttttcccctgtggcttgaggggaatgggatttaatcatttttagaatatgtaattcatataagtaaaagagaggaaacctcccgtgatccgcgctcttaagcacttaaaattatttgggaggaaaaattattaagatttcttatcgacttcttatgttaaaaaatctattctcccccacccccccaaaaaacttttatgctagtcctgcatttcattagccctgtaagtgtgaaacgtcttaaatgccctctgcagttaaagcattttttgtctttaaattataaaattgattttgctatttggaagatgtcaatgccagtctttatccactttgtctaatatactttgtgttgattggaggaaaggcgagaggctgagacattttaaactgctttctcccctaatgaacagtaacgacccaccaaaaaaaaggaaagtacgttttaatattttgatttaaagttgatgtttcctagtacataggcttttgcttttgtaattctacaaagtgaagttccatactgtcccttgctaatagaataataagaatcacacacgctacccccacacttggagtgacctctgtctgccataaaataatagtttcatagtattgtgctttgaaaaaagtgcctcagaagtactggcaatgcaatttttctataaactcagctgcctgaaagagagagagagagagagagagagatagaggaagagggagagagaatgcatctgaacaattagaatatttcactcccaatatcataatatcctgaattttaatgggattatcttgctttggtgcaaacttaagctgaaagagaaaatagtttgtggggaagtgaggaatgctgtaaatgtttccatatcagatttagaggaaaaaactggcttagaatcttattaaatacttccctattgcttctcagttttaatagttaaattggttccatgtgtaagacagtttgtataactagatttttcgtgcaaaacagaaatactgtttacaatatagctttttggtatgtggatgcatgtggacaagggaggagagaacaagccaccataaaagaaagattctctttgttggctgatttactgatgttttttaaacatcagtaaatcaggccctttgaactcaccaaagaagaaaatccttcctctgcattagttgtcaaataagtttaggcttagtttcatgctcaaatgtaataaatcttcatttgagtaactctagtctcatccttcaattttgcttttgtttaattaacaacaaaattccaataccatttggattgcttcttgggcaaagggagagagccagctataacatttataatcgggggagcacttgttctgctcatcataaaagtgcattggccagatgtcacgcggcagcggagtactgaaaggaaatgtaagacgttcatcagtttcagtagatgatatacccctttgcttcatatgagtgctcagcctgtgtttgtgcaaatggagttataagagcacagggaggcttaaagggaatttctggcccgtagattcttcgtccggcctgattcatgtgcaaatgcaagactcctcaccactttgaaaatactgtatgtgttggtagtatgtccaactgtaataaatacgattctgtagttttgaagaa

SEQ ID NO: 432 - DNA, 2598 bp, Homo sapiens
ggtccgcgctgtgtcccgcgctgtgtcccgccgcggccacttccgaaagcgcgcgggccggagcgagacgggcgcctcgagcgtgccaagacgctctgggcggcccagggagccgcggcgcaccccgcttgacactttggctggtggatggaggtggggaggaactcggcagcccacgggatccgcgggcaggggcggaggttagaccgtggtgagggccgacgggcgcgggttagtcgcggccaatcctgccgggcggcccggccttccgccctcatcaggactccgtagccgggccgggggcgggaggggagggggatttggttggagggaggactggctctaggtcctctcaggtgagaaggagagaaaccgtggcaagtcagggaactttctgatgggaaagctaaagtttggaggtgttcaggaagtcgcccgtgctgccggagaaaccgagactcgctcttgggacggttgcaaacagctccggagaaactcagcccgcagcacgccgcccgccgcccgccgcccgcttgtgcgcccgcagattcctcgccgtggataatctgcccgagctgcttcgcaggcccggccgccaggcttggggatttagagccccatctgtttgcggcggacgcggcttccctaatgcgcagcaattgtgcagacccagactgtcctgcgggtcctagccaccggtgcgggtgccaagcgcctgttaaacgtttgctagtttggggttttgttgcaatctggaatgaaggacaccagttcggtatctgcgctgggtttactttcggatcaccgagctttgcctttcttcactagagattgggtggcatctcttttattaattattaacaggccgaaacgtactggacgttaagatgagctgcttgagatgaaatctttctatataatgtgcccacagcaaattttctcttttcccctgtggcttgaggggaatgggatttaatcatttttagaatatgtaattcatataagtaaaagagaggaaacctcccgtgatccgcgctcttaagcacttaaaattatttgggaggaaaaattattaagatttcttatcgacttcttatgttaaaaaatctattctcccccacccccccaaaaaacttttatgctagtcctgcatttcattagccctgtaagtgtgaaacgtcttaaatgccctctgcagttaaagcattttttgtctttaaattataaaattgattttgctatttggaagatgtcaatgccagtctttatccactttgtctaatatactttgtgttgattggaggaaaggcgagaggctgagacattttaaattgctttctcccctaatgaacagtaacgacccaccaaaaaaaaggaaagtacgttttaatattttgatttaaagttgatgtttcctagtacataggcttttgcttttgtaattctacaaagtgaagttccatactgtcccttgctaatagaataataagaatcacacacgctacccccacacttggagtgacctctgtctgccataaaataatagtttcatagtattgtgctttgaaaaaagtgcctcagaagtactggcaatgcaatttttctataaactcagctgcctgaaagagagagagagagagagagagagagaggaagagggagagagaatgcatctgaacaattagaatatttcactcccaatatcataatatcctgaattttaatgggattatcttgctttggtgcaaacttaagctgaaagagaaaatagtttgtggggaagtgaggaatgctgtaaatgtttccatatcagatttagaggaaaaaactggcttagaatcttattaaatacttccctattgcttctcagttttaatagttaaattggttccatgtgtaagacagtttgtataactagatttttcgtgcaaaacagaaatactgtttacaatatagctttttggtatgtggatgcatgtggacaagggaggagagaacaagccaccataaaagaaagattctctttgttggctgatttactgatgttttttaaacatcagtaaatcaggccctttgaactcaccaaagaagaaaatccttcctctgcattagttgtcaaataagtttaggcttagtttcatgctcaaatgtaataaatcttcatttgagtaactctagtctcatccttcaattttgcttttgtttaattaacaacaaaattccaataccatttggattgcttcttgggcaaagggagagagccagctataacatttataatcgggggagcacttgttctgctcatcataaaagtgcattggccagatgtcacgcggcagcggagtactgaaaggaaatgtaagacgttcatcagtttcagtagatgatatacccctttgcttcatatgagtgctcagcctgtgtttgtgcaaatggagttataagagcacagggaggcttaaagggaatttctggcccgtagattcttcgtccggcctgattcatgtgcaaatgcaagactcctcaccactttgaaaatactgtatgtgttggtagtatgtccaactgtaataaatacgattctgtagttttgaagaa

SEQ ID NO: 433 - DNA, 532 bp, Homo sapiens
tttgtccatgggaggagggagaagcctggaccctccatgaagtagagagtattttaaaagcaccattttcatgggcagcctcttgattttatatatttcaatcacgttacttgagatacaaagcagcagcatgcacaagtaaacccttttgcccacgatttgaattgagaaccatataatttatttaatgctgcccagtcatgaaataatgtaatttctaaacagaaatagtcatttagaaatatacagtatgtcatctaaaccttagctctttaatatgtagtagatacacttgtaaatatattaataattctcattagtctcctttttctcctatctttccctcccactcaagtgagacacaataaaagtggatgagatcagcaaggtgataattgcaaagcacctacaatagcacccaaccactttcttatttgctctggggtatctaggaaaataatatttataaatggccacttactggagaaaagttactggatggatggatggatggatggatggatggatgaat

SEQ ID NO: 434 - DNA, 532 bp, Homo sapiens
tttgtccatgggaggagggagaagcctggaccctccatgaagtagagagtattttaaaagcaccattttcatgggcagcctcttgattttatatatttcaatcacgttacttgagatacaaagcagcagcatgcacaagtaaacccttttgcccacgatttgaattgagaaccatataatttatttaatgctgcccagtcatgaaataatgtaatttctaaacagaaatagtcatttagaaatatacagtatgtcatctaaaccttagctctttaatatgtagtagatacacttgtaaatatattaataattctcattagtctcctttttctcctatctttccctcccactcaagtgagacacaataaaagtggatgagatcagcaaggtgataattgcaaagcacctacaatagcacccaaccactttcttatttgctctggggtatctaggaaaataatatttataaatggccacttactggagaaaagttactggatggatggatggatggatggatggatggatggat

SEQ ID NO: 435 - DNA, 658 bp, Homo sapiens
aatcaagaagctgtgtttactataacataaaatattaaagatgagctgatggtgaaatcctcaagtgtgaagaaagtttcttagctttatagctttatggaaacaagtacattgtattttttcattcagatgaatgaacttttattgaacattcattaaatgctaggcactaggcaaacaaagacttaatagaatgacaacagtaattttccatagagcttgatacagtattggtaccttcctggcagtatcccaaaggatttgttggctttcattaatcctttctagttattcgtcaatcagtgcatcagtcaacatgttgctgagcagatagaggagaatttgcttagagtggtcagatttttattgctgacgttgctgtataaccctcctctgccgaaggctgaaaagtggtatcagtcattgagacataattctgctcagtgtataatagactacaaaataatccttagttatttgagtgtcctttttacgtgtatatatttataacttataccccacctattcacagaaaggatttctgatgtatttcagtggtacaattcacaaaaatgcacatgccgagacaataactattattaaaaatactgttcttaagatttttgtttttgttttttggatacatacatcgtataca

SEQ ID NO: 436 - DNA, 6149 bp, Homo sapiens
ggccattttcgcgggcggaggcggcccggcgggccctgggagagctgggacgggcggcggccgggtggcctcggccacccgctaattgcatcttttcccggcgtctcgtctgcagagggagcactatgtctgcggaagtccccgaggcagcctccgcggaggagcagaaggtgagcgcgcggggcgtgagccctgggccctgcccaaggccgggtctggcgggcggcctgctcccgccaggcggagggccgcgcccgagatgcggggccgaggcgcatgaggccgaggctcctgcgccccacctttggcttcccgccgtcgctggctggtgcgccgacgaattgggagttccaacgtgccccgcgtttactccgaatcgtgccttttgtaacacctccgtgggtcgcggtgttcctcagtcacttatatttacgcgagagcccaggacgcaggctttgggcgtagagcctaagtttttctgtaagcctcaatttggttaggaagttttattttttcctttgaagaactctccaactacttgtattgtgagcgtgcggttcactccaaaagcagtgcctcgtgtgcgggccgcgatgtgggccaggattggcatttcagggccaacccttgtaaccatggtcagtgagtaaagtccggccttcagtgtcttcacctgtaaaggccgaatactggtgcttgcctcccacggcggggtgaggcctagaggaggtgagtcaggtgtagtgtgcagcgcagtctgtgctcaaaaaggtttcagtcgatgggactcaaatatggtacttgactaaaaatcgaaagggtggaattttaaaattttactcacgaaattaatcagggttttattggaaacaggaatattttgtaaacgcccttgtgtcttcctgatgtaggggaataggccgggagtgtcactgtggttcaaattatgaatatcaagcctttgtatttatctaggctggtgtttgtctctcccactgtaattatttccaccgccctgccctcctaggcaggtgtgactggccgagaagtgagaaagggccgaggtatcttgtctcctaaattgtttatcaacaatttttcttacaaatcaggttgtgttgccgttaaatacgattttggtctactgcttgaccttcgtgcgggtttctgcttaatgttgcacttatgtcctaattaagttgggaattggattagtgttctaagcccattccatatgttcttaaaaccgtgttaacttttcttaagttgggtgcttctgttaggatgttaaagtaattgaaaaacaagaaaacatatagcataggtaaaagtccaagttaccacattatttgagaatatcccgtgaaaatagatatatttacgcattaccaaaaaaatggattttgggggcaaaaatacaaatattaaagtttgcaatcttaacagtattattaagtatcacctgcttattgtaaaatgcgtattgtgttcattattgcttgaaatttaggagcccccaaaaataacaagtccctgtctgtggtggtttgccttaaacacttacatcaaacttagcattaacttctggtgcacagtagtgtgctatgtaattttctttgataagttctgttagtatgttgccaaagtatgcagtattgacttctagagtgtaaatacttttacttggaaaagcctaatgtatcttttaacaatattaaggatagcttgaacgttttctcttattgattgtctacattaaacatttaaggtgctttggttttagctgctgtcattaaaatcaaccaaagtgtgttaggaatataatgttccttcttaaattgaggattggctgtaaatgctaagtgcctgtggcgtggatggtgtccctaaccatgaagaaaatgtgcacagtcacttctgtgttcctgtgggccaaatcacctgtttcttctatttggaagatcagttcgatgacctaaaaaattaagttattgtctgtgtacccaattgaccttccacttaaagccaaagtattcagctaaaaatacctttatagtttactggtaggttgcctgttgccgctaaagaattaaggtagatagctgggccttgcatggagtaaaagctaagtcactttctctatcttgagtggtgtgtgcacccttggtaagagaagaaaaccagatagattcctgtcttgtattaggaaacaatatgtacaaacataaaaaataagtataaactcttatctcttaacttgtataccactctaagactaaaacagccaggcgtggtggctcttgcctataattctggcactttgggaggctgaggcaggaggattgcttgaggccaggagtttgagaccagcctggtcaacatagtaagattctgtctctacaaaataaaataaaataaaataaaaattagccaggtgtggtggcatgtctgtaggcctgtagtcccagctacttgggaggctgaggtgggaggatcacttgagaccaggagttcgaggctacagtgagctacttttaaaatattttttaaaaatttaaaaggcctgtgctgtggctcacagctgtaatcccagcactttgggaggtcatggcgagtggatcacttgaagccaggagttgaagaccagcctggccaacacggtgaaaccctgtctttactaaaagtacaaaaactagccaggcatggtggcccacacctataatcccagctactcgggagactgaggcataagaattgcttgaacccaggaggcagaggttgcagtgagctgagatcataccactgtactcctgcctgggcaacagaacaagattctgtgtcagaaaataaataaaataaaatttggccgggcacggtggctcacacctgtaatcccagcgctttgggaggccgaggctggcggatcatgaggtcaggagttcgataccagcctggccaatatggggaaaccccctctctactaaaaaatacaaaaattatccgggtgtggtggcacgcacctgtagttccagctactcaggaggctgaggcaggagaattgcttgaacctgggaggcggagggtgcagttagccgagatcgtgccactgcactctagcctgggcaacagagtgagactgcatctcaaaaaaataaaataaaatttaaactaaaacagattaaatacaacaaagccagtctaaatttttgattgtgtgcttggtattttgctgaaactaaatttccaatgtatttggaatatggcagcaattgttaaaagttgagggagtttttgagtttgtcaagtaaacactcccctaggccatgtggtggctcagttccccttttaagagtaaactatgaggtcactaagtttccagagtcatagatacaatcacattttaagttcagctccattcttttctcattttcttggacagttggagtaacctgctgagtctttgtcaaagaaagctcagatgcagaacccacatagcactacttagatgcaacgtggtgattcagattccccagaatatgcttatatttgcctttgagataaccactgaagtgaaaacaaaacatttaaaagttttgagtacagatctcatgaatctatcagcagtaagctaaggcatgtgtactagtcctggaggggagaagaggcaagtggaaacttaaaacagataattctggccctacagggtggctcttgcctgtaatcccagcactttgggaagccaaggtgggaagatcgcttgaggccaggagtttgagaccggcctgggcaacatagcaaaaccccgtctctaaaataataaatctacacctgtagtcccacctactccagaggctgaggggaggatcacttgacctccaggaggtcaaaaccacagggacctttgatggcaccacagtgagctttgatggcgccactgggtgactgagggagaccctgtctcaaaaaaaaaaaaaaaaaagatggtaattttaattgcactgtgagcagcttatgctcagggaccctggtttatatatctgttctctcacagcactcaacattgtgcttgacattatttacaaaatggttgaatggattttcctcagaacttttctgttaaaacctttgccaaagtactatttcaaaacaaatgacaatgctagtaccacagagaagaatagaccatggtaagatgaaaaccttagcttagacccacttaagaactcttgaacgaaactacagtgatgtgtgtatatattttttcgtttgtgttgtggccttaattttttttttaagatctcaatagcaagttttctagaggttataagactcaccaaactaatatgtcttggaaaggatacccacaggaaagctgtcaatgaaattatttgtcaggtaagagatacaggttggtgcctttatgagtggtagaagaggaaaagaacctttatctgcattattttaatatatcaaccataaagagatataaattgttttcccatgcttccagtattttaaaaataggagttcatattggtattttcaggagctcttttgacaactacttttggttacctaaaggctgaagaatgtttttgttatgtttgagacagggtcttactctgtcgcccaggctggggtgcaatggcacaatgatagcatattgccgccttgaactcctgggttcacctagcctcccacctcagcctccaagtagctgggactgcaggtgtgagcaaccgcctcatccatgttttctatttctattcagagtgaacacaacatgctcccttggtctctgcaaccatcgattcctaacagcctagaggtaaacctcagaaaagtttttaaatgtttctcttagccgtcttagcagtttgcgatacaacagtttgttagggttgcttcttttgtttgtgcaagacttgaatacttaacttctaatccagaagctgtgtttactataacataaaatattaaagatgagctgatggtgaaatcctcaagtgtgaagaaagtttcttagctttatagctttatggaaacaagtacattgtattttttcattcagatgaatgaacttttattgaacattcattaaatgctaggcactaggcaaacaaagacttaatagaatgacaacagtaattttccatagagcttgatacagtattggtaccttcctggcagtatcccaaaggatttgttggctttcattaatcctttctagttattcgtcaatcagtgcatcagtcaacatgttgctgagcagatagaggagaatttgcttagagtggtcagatttttattgctgacgttgctgtataaccctcctctgccgaaggctgaaaagtggtatcagtcattgagacataattctgctcagtgtataatagactacaaaataatccttagttatttgagtgtcctttttacgtgtatatatttataacttataccccacctattcacagaaaggatttctgatgtatttcagtggtacaattcacaaaaatgcacatgccgagacaataactattattaaaaatactgttcttaagatttttgtttttgttttttggatacatacatcgtatacatgtatctgtgtgtaaacatgtatctgtgttaccatatcctggggttcctttcccagcttgtagccaatagccaaaagttcagaattctgccttctgcggaccctattatcaatttagaagctacttacctaagtaaatccatttacattacagcatctatttttaaaatgtagtaaaattgctgtgtaacacaaaggcttcttggagaatgaaacttcaaaaccagatttgaatcataaaaaatacttcttcacggtggctcacacctgtaatcccagcactttgggaggcagaggcagatggatcacgaggtcaggagttcaagaccagcgtgggcaagatggtgaaaccctgtctgtactaaaaatacaaaaatcagccaggtgcggtgatgggcacctgtaatcccagctactcgggaggctgaggcaggagaatcacttgaacccagcgtggggaggggtggaggttgcagtgagccgagatcgtgccaccacactccagcctgggcgacagagtgagactctgtctcaaaaaaaaaaaaaaaaa

SEQ ID NO: 437 - DNA, 6149 bp, Homo sapiens; identical to SEQ ID NO: 436

SEQ ID NO: 438 - DNA, 285 bp, Homo sapiens
aacttcttaaattggatgcatcgctcattgagatttagctttcttctctgatataagcccttgagagatacttgctatacctgacaagttttggtatgtgtagggttttgtttgtttgtttttaaagaaacagggtctcactctgtctcccagggtaggcttaagtgaccctcccacctcagcctcccaagcagccaggactataggcatataagcatctaccacgacacctatctaatttttaaattttttttgtaaaggccaaggtcttactgtgttgcccgg

SEQ ID NO: 439 - DNA, 285 bp, Homo sapiens; identical to SEQ ID NO: 438

SEQ ID NO: 440 - DNA, 435 bp, Homo sapiens
tttaaataaaggaaaacagaactatagcaaagcctaacaatgtctgttaaatgaatagaaaatagaatgagaacaattaataagaaataaatttaaagagctatgagatttctgaggagagaatggttacttctggtgtgaagggttagaaagatttcacagaaattgcatttgtgctagattttgatggatggtaaagagcaacaggcaacagagatgaaaggagggaatgaaaccttaaattatgtccaggaaactaggagtggcccagttagacatgaacacaggagatgtgttggttgggggaagaagttacagataaagtctggaaatgcagtttgagagcagacttggagaactctgaaaccctcaagtcaactggctcaggggaaatcactgaagagttattagcaatacaatgacatggccagggtg

SEQ ID NO: 441 - DNA, 1516 bp, Homo sapiens
tttaaataaaggaaaacagaactatagcaaagcctaacaatgtctgttaaatgaatagaaaatagaatgagaacaattaataagaaataaatttaaagagctatgagatttctgaggagagaatggttacttctggtgtgaagggttagaaagatttcacagaaattgcatttgtgctagattttgatggatggtaaagagcaacaggcaacagagatgaaaggagggaatgaaaccttaaattatgtccaggaaactaggagtggcccagttagacatgaacacaggagatgtgttggttgggggaagaagttacagataaagtctggaaatgcagtttgagagcagacttggagaactctgaaaccctcaagtcaactggctcaggggaaatcactgaagagttattagcaatacaatgacatggccagggtgagttgtaggacaccttggtttggcagtggcctgaagcatggtccagaagtcacagagacctaaattgggatacagagtgtgaaacttgattatgcaaattgagccattcttatcatacccaactaagccagagtcgagggcccggagtcaggtggtaagcactcaggacacagcatctgctccaagaattgacttttctgcaagcccagctgctaaaatggcaagctgtaaccttaaaaacagtgtcacctagtagctgctgaaacgacccgccatgactccaagactggtttttcctaccaccatcactgacacccactaatcagaacttgccagctcccagaagtttctctagtgccagtgagctttcttccacaacaatatgtaacatttcttttattcattttcctttatttatttgagacagggtctcagtctatcacccaggctggaatgcagtgctgcaatcatggctcactgctcacttgacctctcggactcaagtgagcctcccacctcagcctctgaagcagctgggacaacaggtgtgctctgccacacctggctaatttaaattttttttgtagagacaggttcttgctatgttttccaggctggtctcgaactcctggcctcaagtgatcctctcaccttagccttccaaagcgctaggattacaggcctaagccactgtccctggcccacatttctctttataataaaactcccaagcttccctttttcagacataccaaagcccacctcagtctgtgtgtatgccccaaattgctattctgtgattcccaaataaaacatttaatttagagatttgtttctatgttttcttttgattgcaacaggagcgtatggggaaaggcaggataggacagcctgcagaggccatcccaggccccaaagccaccccatttctctgcattacagttggtgtcagcagagcccaagccagggattaggggacactatggctcagaggttcaagctaagcatgggttaaacagtcttgtgaactatcctcagaccctcaccaccatcttcaattttacatctatgaaaaaacttt

SEQ ID NO: 442 - DNA, 10252 bp, Homo sapiens
gtcctgactgacttcaggagagaggaattattgctacgtgcctctttcccaggtacaggggacaggaagtgcctgggctttgactgacaactattctggaagaagtaacttccccggtttgatgtctgggaccccctccctgggaggactggaggggaggagctttcagtgttgttttaatattttttaaaacataataagcttacaatatctggcggttccgaatctgtatgccttttcctcagtgaagaaaatctctgttggctgcgagcagagaagcggcggaaggattcccgactccgggaagccaggtgtcggaaggaggaagtacgcttgaagggggtccggctggccgactctgcactcgtccgttcgtggcccaccgtggtggtcaccaaattgagggcttcctggaaggacctcctcacggtgcccatccactgggtcatgtgggtctgggccactgtgagtttatctcccaggtaatccatggggccagccaggaggagagggaagaaggaagttagggagggagagagcaattaaaacgccagtgtcctcttgcctctttggactcttttgctcatggaagttttgggcttgcttggaggaaaaaaaattaaaaacagcagctttcttcaggcaaaccaagggtaagtaaacatccctgagccaggagccggctgcatccacgggtgccgctcagaattaagaggcagctaagtgccaggctgggagtccaccccagcggagttataaagtcaacacactgggcagtccaggttccagttccagggctcacccagctgatcggccgagacaaggagctttgaggaacaagccggctgcactcactccagggcgtgacggtcccgaaaggcgggggatggggatgggggtgggggtggagggggcggcctttgggcaccctcgtcctcacttcccttcaggtaggcagcccccctgaggtgcaccctgggaggttccggtgggcaagctgccgcaccctgctgccccctgcccggctgccctcggccagaccccgctcacctgacccatgcaggttttctgtcctctggctggagattccaaacctgtcggccggcaggcggctagctcacttccggaggcagccaccagggcccccgggtcccctggctgagcagcccgggatgacatcagcccccgtcttagcgaggggcttcgctgcccaggaatgcaggaggggcctcggggaggcggaggcggtggcggcggccgcccagggagctgacgtccgcccccatttttttctcccccaagtcccaactcgctcacggtccctcggggctgatggcaacttcacgtgcctgccagcctacccacccctgtgccctcacagcaagcgcaccaggaaatgcggctgcacgtgtgtgcatgtgtgtgcactctgtgtgtgtgtgcgtgtatgtcggcgatctggcagccccgggaaggttagcactgctgggaaacggcttctgcctctaaggttacaggcagcgtcttgggacctctggtcggctgtcagtctgtctccctctcgtggtctgtttctctgttgatttctcagcctcgctctcctccctctccctgtgtctcaacttccacttgcttgtctctaagcgtctctcctctctctctccttttcagctgtctctccctccctctctggaaggcaacactgatccaggtgagacagcctctgaggtcccccaggaaggactggggagggctgtatttcagtacaggcggagttgccatggcaacccggggcacagcatctgccctgtcctgggcagcaggctcagcactgggagcaatgggaatgattcatggtttacactaggtcacgtgagctccctgggttttaacccttacagggctggagtactaggggttgggggtacgactagaccctaacacccactgtcctcggccaggccccgctcatctgacccatgcaggttttctgtcctctgcctggagatcccaaacatgtcaggggttgttagaagggggtgggcagcagctggatcctggaggtcaggcacacctgttaaaggaggtttctccttctagcagggatccatgtccccccaaccccactacttttacagacaaggaaatgcagattcagagacatagattcacttgcccaaggtcacacagcaaggatgtcaccaggcatgcaccagagctgctcccaccccaggttttcccaggtctgacatggtacctggcccagagtcagggctctgtaaatatttattgttcggacaccaagtacacaattgaaacccaggtcgctcagaatgcatcctatgtcctttccaccaccacctcacttcagttttgaacaaatatttgttttctagacactggtcaaagggcctcacttgagaaagtttatcacaaaggactctctggcaatatggccaacagatctctttcttttctatgtattcccagtccttacagctattcattctctttctctccctgtctctcttcttctttttttggatacaggatctcactctgttgcccaggctggactgcagtggcatgatcacagctcactgcagccttggcctcccaggctcaagcgatcctcccacctcagcctcctcggtagctaggactacaggtatgtgccaccatgcccagctaatttttttttgtgtgtaatttttgtagagacagggtttcaccatgttgtctaggctggtctcgaactcctagactcaagcgatccacctgcctcagcctcccaaagtactgggattacaagcatgagccaccacatccagcctcattcattctttcattcattcatttaataaagattcagagggtgcctactctgagccaggcactgcatagagattaagagcagagggctcacagcccagcaggggatgacagtggtggctaatatttatcaagaggtaactaaatgtccaacaccatttctaagcattcacaggaatcaactaatgaatttttttgcatgaacccatttgacagaggagactgagatccacagaggtgaaatcatgtaccaaggttatggctgatagatgtcctccaagatgaccatcagtaatccttgcccccttttattcataacctggtgtggtcccctcccacaacgaatcaaggttggtccgtgtggttagcagaataaagaagtgatgggccgggcgcggtggctcacgtctgagtaaagaagaagtgatgggccaggtgcggcggctcatgtctgtaatcccagcactttgggaggccgaggcgggtggatcacaaggtcaagagttcaagaccagcctggccaacatggtgaaaccccgtctctactaaaactacaaaaattagccgggcacagtggcaggcacctgtaataccagctacttgggaggctgaggcaggagaatcgcttgaacccgagaggcagaggttgcagtgagctgagatcacaccactgcgctccagcctgggtgacagagtgagactccgtctaaaaaaaaaaaaaagaagtgatagtgtaggacttctaaagcttggtcataaaaggcatcatggtttctaccttcttctctgaggtcatactggggaaagccagccgccatgttgtgaggatgctcaagcagtcacacacagaaacccacatggagagaatctgaggcccccagcaaacagctagcaccagttgctggccatgtgagtgagccactatggaagcagatgctccatctctagtcaaacccttagctgaccgtagacctggccagtatcttgagtacaacgtcataagaaattccaagtcacagtcactcagccacactgctcccaaattcctggcccatagacatcacagagatacaagtgcccagaggcaagtaggtaactggtccatgagaaaactgaagattgaaggcaaagatggggtggggggctcttgcagcagcctatataccttacattgatatatccagaagtattactccaccatgcaggtgaggaaacatacacaggaaacatacacagggctaggtcgcacttccatgagtgcctggctccaccctccaccacatgcagcctcctaggtcccaggacttctggcatccaaagtgggcctccaaagtttgtccattttccccacacagattgcccatagtgagctcctacaccatgaagtcctcttcatggtctgctccctcattacgcaggcccaggacgtccagagtggaaacaggaacagacctgagaaagagctgagtcctccccgctggccccagaaaagtcacaccagaaatacctagaaagctggaatggcacacagctttttaacagaccatctggacatcggggtgggaaatccactggggtcctcaggaggaaaaatgttaaatcaaaatagaaagtaaaacacctttaaaatgatcatacccagtgttgtcaaggttgtggtgaaacaagacacatatgtccacagcagatggacatgaaaactgatatatatttcctggaagaaatttaacaccctaaatcaaaagtcttaaaaaataatggcttgccagttaatgacatacatattgaaatgtacagctgaaatgtactgatatctataatttttttttgagacaaagtcttgctctgtcacctaggctggagtgcaatggcgtgatatcagctcactgcaacctcttcccactgggttcaagcgattctcctgcttcagcctcccgagtatctgggattacaggtgtgcaccaccacgcctggctaatttttgtatttttagtagagacggggtttcaccatgttgcccaggctggtcttgaactcctgaccagtgatccgcccacctcggcctcccaaagtgctgggattacaggcatgagccaccatgcccggccaataatttattttgaaatgcacacacacacaaaaaatggagtgctgggtgctgtggctcacacctgtaatcccagctctttgggaacccaaggtgggaggattgtttgaaccctgtagtcccagtactctggaggctaaggtagaaggattgcttcagcctgggaagttaaggctgcagtgagctgtgatcacaccactgcactccagcccgggcaacagagtgagaacctgtctcaaaaaaaaaaaaaaaaaaaaaaagtgccatggatggatggctacatttttataaagcacacatagcacttttttttgagacgaagtctcactctgttgcccaggctggagtgcagtggtgtgatctcagcttgctgcaaactccgcctcctgggttcacgccattctcctgcctcagtctcccgaatagctgggactacaggtgcctgccaccacgcccggctaatttttttgtatttttaagtttcctgtgagacacctggtcatgggggggtttcaccattttagccaggatggtcttgatctcctgatctcgtgatctgcccccctccgcctcccaaagtgctggaatcacaggtgtgagccaccgcaccccagccacatagcaaattttatagaatctagctgatgggtgttttcctatataatttttctatatgtttgaacattttcataacaaaaggttggggtgggggggcactgtgtccaacttttgaccctatagttagtgatccagttccacacacaggaattcctttggaaataacaataataatatacaaacattttgctataagaatgttcatcacagtcacatagataatgatgaaaaggtgtaagaacctaattattcaaaaagggacttgctcagtgcagtgcaagccatgctggcgccagaggcaaaaggaaaaaaataagtaatactcatcctgtttttatttatagttctgattcctttctcatcacaaatttttgcattaattttaattttttaaaaacaattgaaatattattcagtgatcagtgacttttcttgatgtcccccaattttgtgccctatgtgagcacctcacttgccttattctagacccaccccgtccttgctaaataagtatagcatcatgattaagggtttggagacccagctatagctcttattagctgtgtgacggtgaacaagttacttgacttctctggttttcagagatgaagtcatcaaactcatcatttccatcgatgcagctagtacctcccctgactaagatccccttttctagaaggtgcacacacacacgtcagctgctgtgaatgctggttacgaaaggctcagagctctaccctcctctggagaactgcccttactgaaggctatgtccagatgcccacagccaatgactgaccaatacagaacacaacactcaggtctccttgcctcaaggcaccaccaactcagtgatgcaattcacactctaggggtccccatgggactgggctgaggctggggctcagctgaaaccacatctgtagttagctttgtcccctgccccagttgttgccctttcttccttatgggtttcgcttgagagctttccctcaatgaatcactgcaccagaatcctcatgtcagtctctgcttctagggaacctgaccaaagaccaccaccaccatcaccaccatcactactgctaactgagcacttactatgtgccaggcattacattgcatcactgtattacaccatcagctcctcccaacaatgaaaggaggctgatactattaatatggttatcactcacattttactgatggaaaaaccacggcagaaagaagtgaaatgaccaacacaaggtcacacagctattaagtggtggagtttggcaccccccccccccaacttcatacctgtgacaagctatatatcctggccctcaccaaatcagtctggatggcgacaagcgcccagaaaagcagagaccaaatggcaggtgggatcatccagttctgcctccttccagaaaggggagaggggtgcagaagtgagctacaaagccagattcctgcttgttccctcctggcttcctttaggtacagagcggtctgcaagtgtgactataaaaagcttcgcttcctgaaaactggggcagcacaagcattttcccccccagaggactttttctgcaaagtcttctgttctctccaggaaactcttgggatgttttgggcatcaaaaaagaaagaaaaccatctttttcttacataattaatccaaaaaatgctggagaagctgctgagatccaggaagtaaatgggaatttcttttacaatgtgaggcgagacacagagatcgccatttctagacaatcacgtgtgatttcagaaatcagaaaatgggccaggcgtggtggcttatgcccgtaatcccaacactttgggaggctcaggtgggtagattctctgaggtcaggagtttgagaccagcatggccaacatggcgaaaccccatatctactaaaaatgtaaaaattagctgggagtggtggtgggcacctggaatcctagctatttgggaggctgaggcaggagaattgcttgaacccgggaggtatgttgcaatgagctgagaacacaccattgcattccagcctgggcaacagagcgagactcagtctcaaaaaaaaaagaaaaggaaggaaagaaagaaagagaaagaagaaatcagaatatgtcggtcattcattcattcaacaaacattccctggacagttactttctgcaagttcagtgttgggcttgaggggacctatggtctctgaagagctcagtgtatctatctgattcttagccattaagggtggaaggccaactcaaatctgaggctatcccattttctccccaaaatcaaatacaaaaatgtataattttaagaatccctggtctggtggaagaaagaaataggaaaaaaaaaatgaacaattgccaagggttctgatgaacaagtgaataacatgctatgggaacataatagggagggtgaaccccaaccaagaaattcaaaggttgaggaaagaaggtcacagggaaatgatcacttattaaagacttacaatcaaaagaagggtatctgggtggggttttgaaggataaataggagtattccaagagggctgaaattgagaacaccacgtgcaaaggccaggaagtcggggcacgttcagtcttgccctcggagttctggacatgtggcatccctgcctacagctgccttcccctcctctcccacctccaagacaaccttcggctttttccagatctcccgcaggaggtcccactcatatgaccctcttcacatcctgcttcctaaaagattggacattccaggactgtgcatcctagactaagaggtacactaatattatgttaataaagaaggtggggccaggagcagtggctcatgcctgtaatcccagcactttgggagtctgaggcgggtggatcacctgaggtcaggagttcgagaccagcctggccaacatgacaaaaccccatctctactaaaaatacaaaaattagctgggtgtggtggcagtttcctataatctcagctactcaggaggctgaggcaggagaatcgcttgaacccaggaggccgaggttgcagtgagccaagattgcgccactgcactccagcctgggcaacagagcaagattccatctcaaaacaaaacaaacaaacaaaaaagaaggtggtacagtggaaataataaccactaatggaggatttactgtgtacccaggaaacgtttacttgcacatctcacctcattaaccctcaaaacaacacttgagcgtgagtcgtattagtgatgttccccattttgcagaggccagtgaggtttaaaaagccaaaaggacttgccctgggctggttgtggtggctcacgcccgtaatcccagcactttgggagaccgcgatgggcggatcacaaggtcaggcatttgagaccatcctggctaacacggtgaaaccccatctctactaaaaatacaaaaaaaaggccaggtgcagtggctcacacctgtaatcccagcactttgggaggctgaggcaggcagatcacgaggtcaggagatagagactatcctggctaacacggtgaaacctcgtctgtactaaaaatacaaaaaattagctgggcgtggtggcaggcgcctgtagtcccagctacttgggaggctgaggcaggagaatagcgtgaacctaggaggcggagcttgcagtgagctgagatcacacgactgccctccagcctgggcaacagagcaagactccgtctttagccgggtgcggtggtgcgtgcctgtaatcccagctacccgggaggctgaggcaggagaatcgcttgaacctgggaggcagaggttgcagtgagctgagattgcaccactgcactccagcctgggtgacagagcgagacgccgttctcaaaaaaaaaaaaaaaggcggttggggggggacttgcccaaggtcactgagctggcaagagggctctgggacttgaacccagacctgtctgatcccaaagcctttcaccacctcatttctctgcacttacctgggttgttccccaggcctcttgtgagggtcaggaaaagccttcagaagggcttgcccagttgccaattgcattagtttccctttcttgtcgactggcctggagacaaattcccaggactacgtgtgggaagggctggctcatgaactcagcttcaacctacttttttctctctttcaggtggagcaacaccgtcagtcagaaggcagcggatggcacagggcttccgcgtaaggcctgcatcgcctgagtcatggttttctcatcttgtatgaggcccacccccttcaaaaggttgtgacaaaaaaaacaactgagataatttgtgccgctggcacatagttaacactcaataaggccgggcgcagtggcttacacctctaatcccagcactttgggaggctgaggcaggtggatcacttgaggccaggagttcgataccagcctgaccaacatggtgaaaccccatctcaactaaaaatacaaaaattagccaggcatggtggtgtgcacctgtagtcccagctacttgggagcctgaggcaggagcatctcttgaacccgggaggtggaggttgcagtgagcggagatggcaccactgcactccagcctgggcgacagaacaagactctgtctcaaaacaacaacaacaacaaaataataaatggtgaccacaaggga

SEQ ID NO: 443 - DNA, 2418 bp, Homo sapiens
atcatcgtaaccttgacgtggaagaataatttatccatgcccccagacaaggaaattgcaaaatattatttatgaaggcaagtcggcacgtcataattctggccctgcatttctggatgtgtctggccaagacggggagatgcagttgatgtttgataataaaatgggacctcgtgcctgggagatggagctgtgcgggaatcagagaggcaacggtcttgcaagagagactccagggaaggactgttccagaaactgacctgaattgttcttctgtggactcccgggtcagaagtggtaggacaaaagtctccatgaaaaagcagggaagccagaatgggtgggatgttggacatctgtttggggaggccagagatgtgaggaccttcctttggggatgacagccttgctttggggcacttgggcagttgtgtagcacagcggttgtgagtcctggctctgtcactgctgctgtggtaggtgctatggggcaagtcaggcaatacttccaaatctcaatttgttcatctgtatgatgggaataagaacatatctaccttaaggattgcctccaggttaacacgcgataatacaggtaagacataattgtcagtgggcctgacttcaattaagttgagtgattaaagatgcagctctggagctgacaacctggcctggcatcccagctctgttccttactggctgtgtgaccttgagcaagtcacttcacctctctgagcctccattttcctcatctgtcaaatgggtacaaaaagggtctctagttcatacagtagtcttgagggttgaatgaatgaatggaaaaaaagagtttaaaacagtgcttgtctcatagtaaacgttcagcaaatgttggccattaatattacttcctgggccatgattcttagtgctctttctttgaaaagctttacttggatttacaagcaccttgtcccattgctgatgccatcaaacaacatgcttagtttaaaaatccaaacagacttgcactcccaatgaaaattgcaaaattttgcaaaattttcattgggaaaattcctctgagcattggaaagcttctcccagggtgatgaggtttctcccatatgttcccagggaaaccaccctagcctctgtccactgcagagggaatggcagacccggacagctctgactgcccgattcactaaaccgcacacaccaactcctgaaaacgccaccacacgctctcaggcaccagccggaaagttcagcctggcaagtgttttgcaacctctcagcattttgtggttctaccgaattagcgtttggtattgaattagtattcattttctctaatatgatataaaagtataatcacattagtgacttttatagcacattagattgtacatttggaacacatccctgcctgaaacagcttaaaaaataaaaaaaaaaaataaaaataaaaaccagccaacaataataacaagcaaacccgctcacaagccctggcttttccagctggactgcagcaacctggatagaaaattcttgctttctgcctcctggtccctacagagaaagaattttcattccaccgccctgatttgtgaagcattgagtttaagactttaatagtcgttccaaatgaatgtttctttaatcccggggcagaaacgtaggctgtgattgagatgtaattaatagcactaattactcttcccttgctctgtatcctttccctcctgccctcatccctgcttcccaagaaacctgatggaagcaccaggaatgttccccttttgctctaagatgttccccttttcttcctgccctcatccctgttccccaggaaaccagttagcaggctcagagactatccccattctaaactccttatttcggaatattttctctgtctcccagtggttcctccagggctttccagaatgtttgattttctagaacctgtttttcagccatcctggtgactcagccagtcatgaaggtgatgctctaaagaagcagcagtccatcacctgacccctagcgtctttctctgcagtgacagcctcactgatgcactggtccaaacatgggaaagactcctgaaggtccctgccaccagatgcccaaagctgaggaaccccattcagcagcctggtgagcccaaagcacaaccttagcaaaccattttccactacaaaaagtaaacaaagccgagtgcggtggctcacgcctgtaatcccagcactttgggaggctgaggcaggtggatcacttgagatcaggagttccagaccagcctgaccaaaatggtgagaccccatctctactaaaaatacaaaattagccaggagtggtggcgcatgcctgtaatccctgtaatcccagctacttgggaagctgaggcaggagaattgcttgaat

SEQ ID NO: 444 - DNA, 1196 bp, Homo sapiens
ggcaatgggacccagttccataagccactggtcaagttagcagaaactccattttaaatgccaaagaaggaactgtaatgctgttttggaatcatcccaaggcatcccaagacaccatatcttcccatttaaagcactgcctgggcacaccccaacatcccaggctgtggtggctcctgtgggaactacctagatgaagagagtatcatttataccttctaggagctcctattgggagacatgaaacatatgtaattgactaccatgtaatagaacaaaccctgccaagtgctgctttggaaagtcatggaggtaaaagaaagaccattctggtatgaaggttttgggggaggagatatcaatcaagaaggcttcccagaagaggtgactggaccagagccttgtccacaggtaagacggaggaggccttccacatggagggagaacaatagtaaatgtccactcaagatgtcctttattataccagctcctcccacaaaaacacatgtccagtggactctttttctgggatcagaaccaacaccaaaaagagcttttctccttaaagttagaattctaaacaggacttgaaatggcctcaaggtttgtgcacaaatactgacttctggctggacccagcttattctgtttatttctccaattgcaatttcatccttatcctgagaaaatgtctaaataggccatggaacccaggcttccccgtgacctacaagcacttattagctgtgccagctcctgcactgctgctaaggtccaagaaacccagatctctcacagagccatagaagcagagggctggagtatctgtgaggacaacaaccttgtctaacttcgcgacctcattcttgagcatttctactgatgagaaactcactacccccaattgcagctcattcaactttaaaattgctgctttttgaatcactgattgtgaatattaatttaaaaaaataagtaagaaaatgttttaaatgtgctgcctctttaaaaggtctcctctttgtgcaaccaaaacccacctctctagaatacatttttgtataactgaagctataatttcataccatgagtgctgctgttagcaataataatcatgcccggattttattaacaacagaagctgttgctcgtatgaaaaaacaaacattagttctaataaacatctgcattgagtc

SEQ ID NO: 445 - DNA, 1194 bp, Homo sapiens
ggcaatgggacccagctccatcagacacttgtcaagctagcagaaactccattttcaatgccaaagaagaactgtaatgctgttttggaatcatcccaaggcatcccaagacaccatatcttcccatttcaagcactgcctgggcacaccccaacatcccaggctgtggtggctcctgtgggaactacctagatgaagagagtatcatttataccttctaggagctcctattgggagacatgaaacatatgtaattgactaccatgtaatagaacaaaccctgccaagtgctgctttggaaagtcatggaggtaaaagaaagaccattctggtatgaaggttttgggggaggagatatcaatcaagaaggcttcccagaagaggtgactggaccagagccttgtccacaggtaagacggaggaggccttccacatggagggagaacaatagtaaatgtccactcaagatgtcctttattataccagctcctcccacaaaaacacatgtccagtggactctttttctgggatcagaaccaacaccaaaaagagcttttctccttaaagttagaattctaaacaggacttgaaatggcctcaaggtttgtgcacaaatactgacttctggctggacccagcttattctgtttatttctccaattgcaatttcatccttatcctgagaaaatgtctaaataggccatggaacccaggcttccccgtgacctacaagcacttattagctgtgccagctcctgcactgctgctaaggtccaagaaacccagatctctcacagagccatagaagcagagggctggagtatctgtgaggacaacaaccttgtctaacttcgcgacctcattcttgagcatttctactgatgagaaactcactacccccaattgcagctcattcaactttaaaattgctgctttttgaatcactgattgtgaatattaatttaaaaaaataagtaagaaaatgttttaaatgtgctgcctctttaaaaggtctcctctttgtgcaaccaaaacccacctctctagaatacagtttgtataactgaagctataatttcataccatgagtgctgctgttagcaataataatcatgcccggattttattaacaacagaagctgttgctcgtatgaaaaaacaaacattagttctaataaacatctgcattgagtc

SEQ ID NO: 446 - DNA, 1194 bp, Homo sapiens; identical to SEQ ID NO: 445

SEQ ID NO: 447 - DNA, 401 bp, Homo sapiens
aaccaatcttggtctagaataagtctcaaaatcaaaagacttgaattctagtgcagcgtaggttgactcccttatttatttaattttcccatctctacaccgctagaataacctctctcctgaggctgttgaatctgatgaattagcagataggaaagaacttagaaaattataagttcactcaaatgtaaaaggttatatgggaaataatcaccactaacatttttgagtacttactatctgcttgttatacacattctctaatttaattttcacaagaaaattcatgaaaggactatacttatcccccttttacaggtgagcaacctggagtgcagtgaagtgtaaaatgtgggccgacttaggagcacaaataccccagcaacaatgagcactcttag

SEQ ID NO: 448 - DNA, 401 bp, Homo sapiens; identical to SEQ ID NO: 447

SEQ ID NO: 449 - DNA, 394 bp, Homo sapiens
ccccaagcagccgttccccgactcctcacccctgagcctcaccctgaactccctcatcttgcaaggccataagtgttttccaagcaaaatgcctctcccatcctctctcaggaagcttctagagactttatgccctccagagctccaagatataagccctccaagggatcagaagctccaagttcctgtcttctgttttatagaaattgatcttccctgggggactttaactcttgacctgtatgcagctgttggagtaattccaggtctcttgaaaaaaaagaggaagataatggagaatgagaacatatatatatatatattaagccccaggctgaatactcagggacagcaattcacagcctgcctctggttctataaacaagtcattcta

SEQ ID NO: 450 - DNA, 394 bp, Homo sapiens; identical to SEQ ID NO: 449

SEQ ID NO: 451 - DNA, 401 bp, Homo sapiens; identical to SEQ ID NO: 447

SEQ ID NO: 452 - DNA, 8269 bp, Homo sapiens
cagaccccaatatttggagcagaaccccaagatttgacatctaaaacctcaagcctggagctgaactctgaattctgggcctgggaccttgaaatctgggactggatttccagtactgtaccctggaacccactcttggggacctgaaccctgggattcaggcctcaaattccaagatctggactgtgggattccaaggggcctgaacccgagtttgggcctgaagtccttgctgcagacctgagtgcttaaatctggggcttgagacctcccaatcttgactcagcaccccaatatctgaatgcagaaccccgggatcggatctcagactctaaaccccaccgtttggctgcttagcatcccaagactggacctgggagaccctgaccctgaacaacccaaactggacccgtaaaactggaccctagaggcccaatatttaggggtctggaaccccgagtattaaggtctggagactccgttgccacagatttgagccgagtcaggacacagtccctctacagaagccttggggacaggaaaagcatgaccagatgctccctccagagccctgacctctgactcccctggagctaggactctgctccctggggctgcttctagctcaggtaaggctgctgaaacctcaaggtggggacgggctgggaggagcattgtggctgcgggttacggtaccaggtaccctttgacactcttggggtttctccagaaaaaaagacattcccccatgggtctgccttcagctcctgctctgctccaaacactctctggacactggccatccttgcccctctctgaccttccctgcctcagttgatgggacctccaggtctctgacccctgcaacccttacagcctttcgctgtctatccggtccgaccgtctccgccacctctcttgtccaccactcctctctctgggctcctttctccacctgtcctctcaatggccatctctgttccctttttctctctctgatcatctttgtgacacccctgtccacaggtcctctctccagtcgcctctgcctgctgcttctcagtgaccatcgctgacatctgtgtccactgtgcctctctctaatcatcattcaccagctctcttgctccttctccacccctgaatctaagcctaggtctgtgaccgtccccatccatctttgacattgctgtccaccactcttctctccagcagcctctgtccatctctcctctctagcttcctctggccacctttccctttctctggccatctctcccactgctcttgccctcctcccacccctgaccctaactcccagtctgcaactgtctgaccatctctggccacctctcctctctctctcactcactgatgccctctgatcatctctggccacctcttctctctctctcactcattgatgccctcttgatcatctctggccacctcttctctctttctcactcactgatgccctcttgatcatctctgcccacctcttttctctcgctcgctgatgccctctgatcatctctggccacctcttctctctctctcactcactgatgccctctgataatctctggccacctctcctctctcacttgctgatgccctctgatcatctcgaacatctctgctgcctttcctctctccgatgacctctccccgcaccatcctcctgagcagctgtcctgggctcccactgactctgccatgtctgtccttttcctcctctctgaccaccttgctggctttgggccgtttctgaccacgtgtctctgacatggtcatctcccccagatctgagcccaacccatgccctcccttctctttgtccactgctcatcttcctgaccatctgtaaccccttctcttctctggtcatatctgaccacttctgatcattgttgccaccctggctgccccgtctccccatggccagcttttaccatctctgaccacgtctaaagccctctggttttcctgccactcacccagaccagctgtcatttctctgaccatttctttacttttttcttttggagagacagagtcacgctctgttgcccaggctggagtgtggtggcgcaatcatagctcactgcagcctcaaattcttgggctcaaattgatcctcccacctcagtgtcccatgtagctaggaccacaggtgggcgccaccatgcctagctaatttttaaaaatttttgtataatagatacacggtctcactttgttgcccaggctggtcttgaactcctggcctcaagccatcctcctgcctcagcctccccaaatgctgggattacatgtgtgagccaccgcgcctggccttcctctggcttttggtcacatctgacggtctttgaccagcccttctgccctcagcccactgtgaccttctctcctggtctcagaccacccccagcccctgcagaacccctcttctgccctcacgcctcccctcttctccgcaggacacccctgcccgcgatggccatcctcccgttgctcctgtgcctgctgccgctggcccctgcctcatccccaccccagtcagccacacccagcccatgtccccgccgctgccgctgccagacacagtcgctgcccctaagcgtgctgtgcccaggggcaggcctcctgttcgtgccaccctcgctggaccgccgggcagccgagctgcggctggcagacaacttcatcgcctccgtgcgccgccgcgacctggccaacatgacaggcctgctgcatctgagcctgtcgcggaacaccatccgccacgtggctgccggcgccttcgccgacctgcgggccctgcgtgccctgcacctggatggcaaccggctgacctcactgggcgagggccagctgcgcggcctggtcaacttgcgccacctcatcctcagcaacaaccagctggcagcgctggcggccggcgccctggatgattgtgccgagacactggaggacctcgacctctcctacaacaacctcgagcagctgccctgggaggccctgggccgcctgggcaacgtcaacacgttgggcctcgaccacaacctgctggcttctgtgcccgccggcgctttttcccgcctgcacaagctggcccggctggacatgacctccaaccgcctgaccacaatcccacccgacccactcttctcccgcctgcccctgctcgccaggccccggggctcgcccgcctctgccctggtgctggcctttggcgggaaccccctgcactgcaactgcgagctggtgtggctgcgtcgcctggcgcgggaggacgacctcgaggcctgcgcgtccccacctgctctgggcggccgctacttctgggcggtgggcgaggaggagtttgtctgcgagccgcccgtggtgactcaccgctcaccacctctggctgtgcccgcaggtcggccggctgccctgcgctgccgggcagtgggggacccagagccccgtgtgcgttgggtgtcaccccagggccggctgctaggcaactcaagccgtgcccgcgccttccccaatgggacgctggagctgctggtcaccgagccgggtgatggtggcatcttcacctgcattgcggccaatgcagctggcgaggccacagctgctgtggagctgactgtgggtcccccaccacctcctcagctagccaacagcaccagctgtgaccccccgcgggacggggatcctgatgctctcaccccaccctccgctgcctctgcttctgccaaggtggccgacactgggccccctaccgaccgtggcgtccaggtgactgagcacggggccacagctgctcttgtccagtggccggatcagcggcctatcccgggcatccgcatgtaccagatccagtacaacagctcggctgatgacatcctcgtctacaggtgcagggtccaggcactggggtagcttgggtgggggagtgaggcaaggggagggttgagggtacacctactaataccctacaccgaagcacaactgataagtgatgctggaaggttccaaaagaaatcagagagcaaaagtaaaagaaatcaggcagcaaggataacaagactctggcagaaagggtcaatgaaatctgacagcagtgataaaaagaagtcagacaagaaggacgaagtaaatgagacagcaaatgttaaaatatatcaggctacagggctaaaaaagatcaagcaataaggataaacgaaatcaggctgcatgagtaaaaagaaattaggcagcaagaataaatagtagtagcaaacataaaaaggaaaccaggcagcgggaggagaaagtaatcagggcagaagaataaaatgttaatgggcaagggtgggtggggaagataaggggataaaaataaatttaagttgtaaagataaagagagaaacaccaggttttccagatgacaggactagatactagctgggctgcaggaagaaaaggagatcaaacaggaaagcacagggagcccagaaacaatgaaataagcagctctgttagaaaaagaaatcagaccagaggttagaaggaaattgcagggaggaggttcgatagagactgggcttcggtgtgtgtggtgtgaactattccatgtttcaagttctaatatagtgacatccagatttttttttttttgagacagggtctcactttgtcgcccaggctggagtgcagtggtgcaatctcggctcactacaacctccacttcccgggttgaagcgattcttgtgcctcagcctctcgagtagctgggattacagacgtgcaccagcacgcccagctaatgtttgcattttatttttagtggagacggggttttgccatgttggccaggctggtctagaagtcctgacctcaggtgatccacctgcctcagcctcccaaagtgctgggattacaggcgtgaaccaccacacccagtgtagattttttcttttctttttttttttgagacggagtctcactctgttgcccaggctggagtgcagtggcacaatcttgactcactgcaagctccgcctcccaggttcatgccattctcctgcctcagcctcccgagtagctgggactacaggcgcccgtcaccatgcccggctaattttttgtatttctagtagagatggggtttcaccatgttagccaggatggtctcgatctcctgacatcgtgatccacccgcctcggcctcccaaagtgctaggattacaggcctgagccaccgcgcccgacagattttttattttctaaatcaaatcaaacctagttcaagttccttttgccaggtaaacagaaatatccagtttgccacacttgtgggggattctcttctctctcctgttgttgcaaacacagaacctggggtttacacactccaagaggtggctcagtccaacttgttcccccaagctggagagcactcagcacatctgcagtgaccgcatgtggtcagcagtggtggctgctgacctaggtgctgttgacacctcttaccaaagtccaaccttgcatggatggactgcggctgtgggtgagtccctgtcctcacggccaggctgggccaagggtgcagccccaaggctgactgtaaagactggacctccccagggttgaggactgttccttggggacctagtagtacctggatgtcctttccctcccttggggccaacacctcaagaaaaggccacttgatttccatttcagtcctggcaacccactgagctcattctactccctttctcagacatgactcggaagattgcacggaagtcctgcccctgaaaatcacacaagtcggccaggcgcggtggcttaacccctataatcccagcactttgggaggccgaggcaggtggatcaccaggtcaggagtttgagaccatcctggctaacacggtgaaacctcgtctctactaaaaatacaaaaaattagctgagtgtggtggcacgcgcctgtagtcccagctactcaggaggctgaggcaggagaattgcttgaacctgggaggcggaggttgcagtgagccgaggctgtgccactgcactccagcctgggtgacagagtgagactccgtctcaaaaaaaaaaaaaaaaagtcacacaagtcctggccaccttgccaggtggggaatgggatgaatgctgtcctagacagtcaccctgccccaggcggccacggagttccctgtacctctctcattagaatagcctaggaataaaacaggtgataagtcaactctccaacagggtgcccaactacaaaagaaactatagtgaaattgggtggtaaggattaaaaggaaacaagaaagaaaaagataaatagaaaccagccaacagagataaaagagaagcaggtgacagagccggaaagaaataaggcaacagggagaaaaagaaagcagtagtgacggaggcacattagtttaatgaaaagggaatcagacgacaggactcattggaaaacaggctatcaatacagtcatcataataaggcaatagggctagggggacatttattggcaggttacaaggaaatcgggcaacaggggtacagggagatcaggtggtttgattggagagaatcctagctgtacactagaggaaaatcaggcagctggaaaagggaaatttggcataggctgcaggaaataggggaaccagagggaaattggcaagcgtctggaggagactgggaggtaaaatgtgggggaaattggatgggggtggctagaagacaaaaggattaaattagatggaaattggacagggttagagcagaattgggtggtgaactggagagatgactggcagtgggaccagagtgaaatcaggcagaggattggggcaaaattgggcagggaggctagagcggagctgggctgcaggctggagggaaattgagtgggcagtgcaaaagggaaattgggcagttgggtataaaatgaaaccggcaaggtgtggtggctcacgcctgtaatcccaacacttaaggaggccaaggcaggaggctggactgccttgaggccaggagtttgagaccagcctgggcaatatagcaagagcctgtctctacaaaaaatttaaaaattagctgggcatggtagtgcacacctgtagttcctgctactcaggaggctgaggccggaggatggcttgagtccaggagtcagaggctgcagtgagctgtgatcatgccactgcactccagcttgggcaacagagcaagaccctgtctataagaaaacagaaagaaagaaagaaaagaaacaggatggattggaagaactcacgtggtgagctgttagagaaattgggtggtgggactagagtgaaaatgggcagcaggctatgaggacgtgtgagagggtgggctagagtgaaattggccaacagactggaggggtatcagtcaggtggctgaatgggatgtcagaccaaagggaattgggatgttggtgagagggagctcattgggtagaatgaaatgaaggagtggactggtgggaagtctagccccgcagggagtttggtgggggaagcacaggttgggggctgggcagcctgagacctgacccccacctgcctgccctgcaggatgatcccggcggagagccgctcgttcctgctgacggacctggcgtcaggccggacctacgatctgtgcgtgctcgccgtgtatgaggacagcgccacggggctcacggccacgcggcctgtgggctgcgcccgcttctccaccgaacctgcgctgcggccatgcggggcgccgcacgctcccttcctgggcggcacgatgatcatcgcgctgggcggcgtcatcgtagcctcggtactggtcttcatcttcgtgctgctaatgcgctacaaggtgcacggcggccagccccccggcaaggccaagattcccgcgcctgttagcagcgtttgctcccagaccaacggcgccctgggccccacgcccacgcccgccccgcccgccccggagcccgcggcgctcagggcccacaccgtggtccagctggactgcgagccctgggggcccggccacgaacctgtgggaccctagccaggcgcccccccctctaagggtcctctggccccacggacagcaggacccggacaccctgtgggacctggcctcaaactcaccaaatcgctcatggtttttaaaactctgatggggagggtgtcggggacaccggggcaaaacaagaaagtcctatttttccaagcttgggcgaa

SEQ ID NO: 453 - DNA, 7737 bp, Homo sapiens
agatattcctcgagccaaagtggtgagagtgtgtcaagcgcttatggactacaaagtatttgaagcagttccaaccaaagtctttggaaaagacaaaaaacctacatttgaagatagtagttgcagcctttatagattcaccacaatacctaaccaagacagtcagttaggcaaagagaacaaactatattcacctgccaggttggtatataatgttagattatcacgggaatattggcaggattttgtctacctttttatgagatgcctactggctttatattacatttttagcagtaaatgtggctaaaatatgggtctgtgggtaaatttgataaagtgcgatgaaattttgttagctttattgggtgtctcctagtcatattttatatttagcagaagcagtcaacacactttgattttcctgcttcaggttatagttgcagtgtaaaaagtgttctcataccacttggtatgagaacatagcgaaggcaggcagagagaaacccagattgcggtgggagagaagaaggaattatttaaagggaaactggggagacagaattgtggaatccagtgattgaaatggatgtgggtgataatgcataatgaacttacagctatttgtcatgaagtaaaccaactttaccctttcccctttgttaccctcagctaaactgtgcagtggtgacacagaggtataattgaagctcttatatcagatctgacctaaagtcagagttttagtgtattcattttcgtgtgtgtgtacttttttgaggcagggtcttaccctctcacccagactggagtgcagtggtgtgatctcagctcactgcattgtctgccttttgggctcaagcgatcatcctagcctcccagtagctgggactacaggcttgcaccaccatgcctggctaattttttttcttttcttttttttcctgtggagacggaatcccattatggttcaagaccaggctagtctgaaactcctgggctcaagtgatcctcccatcttgtcctcctaaagtgttggaattagaagcataagccactgcacctggcccatttttacatgttttgacccaaactaaaacatgataaaatttacctctttgtgtagaaaggaaatatgaggataaagtaacgcacagtcaaaactttcagatgcaggtccacacacttcatctgaaatccttgggaccggatgcatttaggaatttggaactttggagcatttagaaaagttatcttgtacatttatgtggttcaccatccctggaggcatctgggacagcatctggtaatcaagcataatgatatttccgtggtaaacaaaagaatatactaccgggataaattaaagctatcatagtctcgggacagattttgtcatgatatgagctctaaataaacctttgattttcaaagctttttgggtttcagaattgcaggtaaagggctgtagatctgtatttagaaaacgataagtactgttcaccaaagaatgccccacaaagagataactgataaacccagtaagcataatgaagtccagttatgtttgatcgcatttttaaactggtgactaagattttagtcattgaattagttaaatctaagaaaatgttcaaaggagaacagaatatgtttatgcttgagaaagaaggtgggtgtttttataatttattctactcttagaatttgaatttgttgtgtttttgctctgaaatgcataactctgtagaaaactcttagctctcaaatactaaaatatttctgtgggcttagtaaatgttcatttctgaaataaattcattttaggtatgcagatgcattatttaagtcatccgatatcagatcagccagtttagaggacctgtgggaaaatctgagtttaaagcctgccaactcccctcatgtaaatatctctgcaaccttgtctccacaaggtaagctaaggatgaagcaaagtaagaagtagaagacaaacttcaaagttatttaaaattttttaatcttaatctttattagattttaaatattcaaagtacagagaaagagtgcactatgtattaaagctgtttatgttcaattttaacagaagtctattatctttaacaaatagatcagtgttagaactcttgaacactgacttttgtccgatcagctggcaaaggttcagatctgagatgttttgcatgcagatttgtattgaaaatatgctctccgatgtttcttttcctaagattttattaggtcaagtaaaatttgaaaattacattaaaacattaacagaattcttcggttcttccttgtctgtagcaatggaatatagtttaatgactttaatttccaccctttcccccattccagatgtggaaaccctgagtggaataatctgcagccaatagtttcaaacaagtttttagcttgaatgaatcattctttcttccagagtccttattaacatgttacatgacttgatctcttatctctgacagattgctttttacagtacaaagaatgaaaagaattcctgttgtccaaagcctattctcctacactctaaacaaatcttggattgttttactttgttataagaaagcacttcgtaaggttgactttttctttctttttggccacaaatttactagcttagacctgcttagaaaaatattatggtgagcatgtagtaactattaattgttacttttcaccttgtcatttttcctgtgtagttattaatgaagtgtggcaagaagaaacaattgggcgtctactacaacttgtagaccttccacttcttgactccttactgaaacagcaagaggctgtacctaaaattcctcaacctaagaggcagtccaccatggtcaacagcagtaactatctggatcgagggattctcaaggcttatagtgactctcagtatgtggaaatacatataataatttgagtgtgtttgtaggtagattgagataatggttttaaggtaatctgttctattcttttttctataggatcagatatgcattgttagttgatattatcagtatttgagaatgtgaagaacaaaattacattagtcaaaattagaaaaagatttgtttcatttttcatattcatttttgtttcacatataacttgcacattaagtgaaaaaaaatgattatgctttagcttcttatctttgttaaaatgtagagctgtctggactctcaagatttcctcaaagggacctggaagaatagaaacagatttgacagattattgagatcctttgattacatatctagaatgcctgttacatatgtatttagttaactagttgtattaaagaaatacaataaggccgggtgcggtggcccatgcctgtaatcctagcactttgggaggccgaggtgggtggatcacttgaggtcaggagttcgaggccagcctggccgacatggtaaaaccccgactctactaaaaatacaaaaattagccaggcatggtggcacgtaatcccagctacttgggaggctgaggcaggaaaatcacttgaacttgggaggcagaggttgcagtgagctgagatcatgttgctgcattccagcctaggtgacagagtgagaatgtctcaaaaaaaaaaaaaaaaaaaaaatgaaagtaactctctcattccagttactcctctcttgaatataaatcctaaggtttgaaggcttaactttaggtgctgagggaattaaaatttttttttccttaaagacgagttctgcattactcataactttgaggctcttctataaaaattattgtcagttaaaataagttatcagatttttctagcttaattttttattattttgccttagcagatagtgttccagtctaattaaggagatgaaaatgtttgaaaggaatacaattacattttcagtacttcactaattctacgttccaaagaactattaatactataaacagttgaatgccaaaaggcagcttaaagccttatatgaaaaagttaatcccaacatatgtgttactgaattctgcagatataacacatttctataacctaaaggaacatgtgaaacattgtgtaattactaaattttttttttttgagacagagtctctctgtcgcccaggctggagtgcagtggcatgatctcagctccctgcaacctccgcctcccgggttcaagcgattcttctgcctcagcctcccaagtagctggaactacaggcgcacgccaccatgcctggctgatttttgtatttttagtagagatggggtttcaccatattggccagggtggtcttgaactcccgaccttgtgatctgtccaccttggcctcccaaagtgctgggattacaggcatgagccactgcacccagccttgtaattagtaatttttatatacaaaatcagaatttgcgctagaagtgaccttaaagatcatcttatcatataaagttgaagctgatgtcaagagaggtgaaatgacctgcctgagatacctcacctggctgaattagttgtcctgagtccatggcagtatggcagtagaggacatgattgattgctttttaacgatagatagatagatagatagatagatagatagatataaaaaatggaatattaaaagtttactactttatttcttgaaatgtaacatttttctgaagttacccagcaggattttactgtagatgataattgatatttaattattttgttggtttgttttttgagatgaggtctcgctctgttgcccaggctggagtgcagtggctcaatctcggctcactgcagcctctgcctcctgggttcaagcaattctcccacctcagcctcccaagtatcttggattacaggggcgcaccaccacacccagctaatgtttgcatttttagtagagacgggatttcaccctgttggccaggctggtctcgaactcctgacctcatgtgatccacctgcctcggcctcccaaagtgctgggattacaggtgtgagccaccgcgccgggcctgatgtgtaattattttgaaatgtttcttcctttaatctgtcctagctaaagggagagctaatagatcatagacagaggtctgaagtaagcaacattgtgttggagaaatactggcccagaactcagatctgagatctagtcctgcctgaggcctgagcaagtaacttggagtttctgggtctccatcgtaaatgtgaagagcaagagtagagtttgaatttgtatgctcttttcacctctgtattgtggtggagagtttgttttcgtgaaaaaggaaaaaataaagggaaaacattaagctgaatttgtaaatgtgatacgtgatctagctatatattaaaaagaactacacatatcttttaagctcatgtagaaatttatcctgatggcttgaaatagctactgaattaggtaccatgtgtatatttgttattctttgccttttaaataatcttcccttgccttttaaataatcttcccctctcccctatagggaagatgagtggctctcggcagcaattgactgtttagaataccttccagaccaaatggtggtggaaataagcagaagctttcctgagcaaccagaccgaacagacttagtgaaagaacttctgtttgatgccattggcagatattacagtagtagggaacctctgttaaatcacttatctgatgttcataatggaattgcagaactcttaggtaagtaagatctaactggatactagcatttatcttttggaggaaacaagaaaaagttagttctcaaactgaaccagaatagtactactacaagctgggagtggatctggattaattcatggaaagtatgtttgttcaaaaacttctaggggtcatttggaaagaggctttaacaagctctgaagttatgcagaaacttctggttacccaggagtataatgctgctctcattcaccggaagcttaagcataaagcagcaattctctttttttagaagagttatcagcaccaccattactcccctttcaatctcttcaaaatggcagactctctgctttgtctctctaccaatgagccacataatttgttggaaacaaattggaggtttcagaaaatttatttttctcaaggagagttggatacatgagtattgtacacatggtatactcccaaatgtactgaattaatgaaaaacagaatgggattttatccacaaagctaagagttagatttaatgccagaagatattatatgacagggacttaggctgttagttgccaatttgagaacaagctgcctttatggtattcaccatttattgttaattcctagtcttgcttttgcttttggaaataattttgaataagtgcactttttaactcaaactgtaacttgagttttgttccctttaatatagtcatatttggtcaattaaaagcagtttttttcttttggctaaagtgaatgggaagacggaaatagctttagaagctacccagctccttctaaagcttttagatttccaaaatagagaagaatttagaagactactgtatttcatggctgttgcagcaaatccttctgagtttaaattacagaaagaagtaagtcttttgtttaactgttagttgtatttaatatccttaatacttacaggttaagtattagattattccatcttcagcatcaagtatgctgaaatgtataatagctattaatatttaatattcccttttatattaaacttgtctcttaaatatatactattggatatatttgttttatttttatagagtgacaaccgaatggttgtgaaaaggatattctcaaaagctattgttgacaataaaaatttatccaaaggcaaaacagatcttctggtactctttttaatggatcatcagaaagatgtttttaaggtaaaattgtgaaagtagttaaattgagcttatgtaatagatcactagattaaaatgcatttgaataatgtcccatgtcccttctttttcttaagattcctggaactctacataaaattgtaagtgttaagcttatggccatacagaacggaagagatccaaatagagatgcaggtaatctgagaaatattattttcatgatcttccaaagacaaatttcagatgttttttgaaaatgttttgctataagtagttgaactttaatttcaaccaaatttaaaacattctcctcagagttattcatacaaagcaactttacaagtgttagaaagtcagcagtgcttaccatcttcagtgcatattacaaaatggggaagaaaaacataaagacaagaatattgcttgatttttctggttaaatatgaggaattgagtcattaactgaactttttacgtttaaactttaaggatatatttattgccagagaattgatcaacgtgactattccaacaatacagagaagacaaccaaagatgagctgttgaatttactaaaaactcttgatgaggattcaaaactttctgccaaagagaagaaaaaattgctaggtcaattctataagtgtcacccagacatctttattgagcattttggagactgagtttttaatatctgtatataagttgtgtattttaagaataaattatgtatcctaaatatccaatcacatttgtaagtgtggaagctctaaatttgaaactgtacttaataaaaatttttttgtataacttcgtg

SEQ ID NO: 454 - DNA, 101 bp, Homo sapiens
ctgtaatcccagcactttgggaggctgaggcaggcggatcacgaggtcaggagatcgagaccatcctggctaacacggtgaaaccccctctttacaaaaaa

SEQ ID NO: 455 - DNA, 463 bp, Homo sapiens
atgaatttcaaatgacccacttataatttatggctctagtgcactaagaggagtttttgtttatttatttatttattagacggagtcttgctttgtcgtccaggctggagtgcagtggcactatcttggcttactgcaacctccacctcccaggttcaagcaattctctgcctcagcctcctgagtaactgggattgcaggtgcctgctaccacgcccggccaatttttgtatttttagtagagagggtttcaccaccttcggcaggctgtaaaggagttttaataatgtccttcaggagcttatcttatgctttcttcatcttaaacattctattttgcctaaaaaagtaggaagataatttcaagtagcaatttctttaattataattcccttttttccttaccattgtactcatgcatatggttttcctttctagacgatcttaaaggaagtaataactt

SEQ ID NO: 456 - DNA, 7703 bp, Homo sapiens; identical to SEQ ID NO: 415

SEQ ID NO: 457 - DNA, 464 bp, Homo sapiens; identical to SEQ ID NO: 416

SEQ ID NO: 458 - DNA, 10046 bp, Homo sapiens
aggggctaagtgatggatcttgtactccgtgttgcagattactatttttttacaccatacgtgtatccagccacatggccagaagatgacatcttccgacaagctattagtcttctgattgtaacaaatgttggtgcttacatcctttatttcttctgtgcaacactgagctattattttgtcttcgatcatgcattaatgaaacatccacaatttttaaaggtaagaaatgtttttacctattttctaacgattaaagtaaaaataacaatatgatatatttctgagatttttagattaagctgattatatgtaaccattaaataaaattttggagaccaaccacaaatgggttagatattttcatgagggttaatccctgctctccttcccttagtttaagcaaatctaactttttaataaaactataagtctagtatcgtatcttgctagatgcatattggagcatttttatgctgatattgatgagtaaataaatgcatacatttatgtaattattttaatatatgattttcacaaactgaaatgtgtttttttaccatgttttgttttttggctagataggggattcaaactcagtagttttaaagttgtttacaatcatttttaaatttcggttgtttgtacttgtcagtgactccaaggactgaacagcaaaaagaaaaaatagagaggattggggatggaagttaattaggaaagaaatggttattccataaatagaagtttagaatgcagattttggaggaaggaaaaaaggtttcagaatttgaaatacttattgcattttctcagtacaaaaggaatgattttcttacatacctatttttatgtatttaaaattttaatagaaacagtttggaggtaagccccttcatgtaaaagagattttaaaaatccagtccagaacagttttatgctagttttgtttaacatggattttgtgatttttaagtattggaaatttcactttcagaatcaagtccgtcgagagattaagtttactgtccaggcattgccatggataagtattcttactgttgcactgttcttgctggagataagaggttacagcaaattacatgatgacctaggagagtttccatatggtaagtaaataacacgagtgtcaggaagagagtagtctaagcacaggttagtttccttaaaaaaacaagtctgcccttttttttttcatcttttaaaataattacaaattattcagttgttttttaatgttctattttcatgtgttcatgtcttgccacatgtgcatttctttagtttttctatcaatctgaaagtctgctgtagatgagattgtgtctggcggaagattggagtgatcagagatgggtccttgcatttgttttctattaattattgaattcaaccttctaaaaaaaacttgagtagcttatgtcattgctgaaagttaaaaacagatttttaaaatgcattattctgcttcttagaaactgtaactcttctggcatacaaccacccacttttctgtgcctgtatacttcattgtttacattacacaaatgaagtcctgaggtgcatagtggtttgggctctgaattttgtttctcttagcaacttacatggttgtattttcatgtcaaaaaaatcttgagattatgtaatatattagtcatagtactgtgcggatattcataagttatgtaaatgatacctaattgttagaccttcagattgttactcttttttgtattataaacagccctgtagtgagtaaacttttgtgaaattctgaaactttttcaagatacatttctaggatctagtatgtaaaaagcaagaatcatagtatttattgaaggctgatatgtgtcagtgacagttctcagctcttcacaagaatcagtccattgttttcctacaattctatgagataggtactatcactgtgctccttttataggtgagtcaatgaggtgtacagagagtttcagtaacgagttggtggtagatctgagacttggactcaggcttgcaggcaccagcacccccacactttaagtaagaagttagttattgccgggcgcggtggctcaatcctgtaatcccagcactttgggagaccgaggtaggaggatcacgaggtcaggagtatgagaccatcctggccaacatggtgaaaccccatctctactaaaatacaaaaaattagcggggtgtggtggtgcacacctgtagtcccagctactcaggagggtgaggcaggagaatcccttgaacctgggaggcagagattgcgccactgcactccagcctgggcgacagagcgagactccgtctcaaaaaaaaaaaagaaaaaaaaagtcagttattcagaagaaggaacaaaaaattatatactagagtaatgaattggctgggctttgaaaaatggatatgattatgagttaaaataaagggagagaggacattttaggttcttgaacccctatgatgaaagatacagaggtaaaacttccaagacagtgggaggacattgagtaaacctgcctggttagagtagaaatacaggagtgatgaggttggaaagatccgaaaggggtggagtatggaataaatgctaaatttaaagtatttagtggaaagtatattttaagcagggagataatgtgtaaagatgggttttaggaagattaatatgaaggaagtgatgattcccagagatttaaataataaagatgtcttaggagtatcctgtctcacaaatatctttatagtttaattaagaagtactttaggtagaacatttcaagtacttatgcgagggaaatgaggaaatgaccagattccaagaagccaagagagattagtttataatatactgaattagccagaacagatcatttataatgtttgagtctaggatcccattttgcactcagatggacatgtgaaaagtgaactctaatcccaggagctgagttttgattcttctgtttcccgttttcttttctaggattgtttgaacttgtcgttagtataatatctttcctctttttcactgacatgttcatctactggattcacagaggccttcatcatagactggtatataaggtaaagtcatttgtggtgaaaagagaaaaaaggttacacatttcagcaatgtatgattataaattctgttctctatttccaagaatttcctctacccatattaaatgtctaagtagccataatcataacaggtacagggtgcattttgttcatattcttctttatgggtctaaggggctgtcttaaaattcgtctgttccggtaacaggtacacatggacttacagagggaacaatagacattagagactccagaaggtgggaggatgggagaggagtgagggatgagacgctccctattgggtacaatgtgcactcttcaggtgctaggtacactaaaagccagacttcaccactgtgcagtatatccatggaacaccactgcacttgtactcataaatccatataaaattatactgttttagggcgaagaaggacattttatagaataaataattttgctgatctctacaggatttgttaggttgtttccaacatgagtgtgagaagctaagttgaatgttgcacggggtaaagtttgcagtgctaattgtgtccttttctcctgcagcgcctacataaacctcaccatatttggaagattcctactccatttgcaagtcatgcttttcaccctattgatggctttcttcagagtctaccttaccatatatacccttttatctttccattacacaaggtggtttatttaagtctgtacatcttggttaatatctggacaatttccattcatgacggtgattttcgtgtcccccaaatcttacagccatttattaatggctcagctcatcatacagaccaccatatgttctttgactataattatggacaatatttcactttgtgggataggattggcggctcattcaaaaatccttcatcctttgaggggaagggaccgctcagttatgtgaaggagatgacagagggaaagcgcagcagccattcaggaaatggctgtaagaatgaaaaattattcaatggagagtttacaaagactgaatagattattgcccagttattcttaagtaaggacaaagaaggaaatatcatcgtatttcttttttttaataaggaaaaaataatatccatacagtcaagatacatagtaaatggtatcatttggaaatcagcatcgtgggcactgctgaggaatgatcctagtggtaggtcagaagaagatgctgtgaacaccaggactttaatcttatgcttaaaatgccagatgttgttcgggggacaacttgtatctttctagcagcagatctgtagtttgtatagcctcaacaacaattttaaataagatggagaataaattattgaggggactaggctatatgcatttgccttcatccacccatgtttattaagaatcattgtgcttaataataccaagactaagcaccataaccaagaaatactaatgtaaagattgtttcttgtttcaggaatggttaattcttcaacgttggtatgataatgataacttgttttgacttgaataaagtactacatcagtgtggaaaaaaattctgatacattagcagctatgtaaatgacctaattgatagcaggtgtaataagactatcgtcttcctacacataggaggctcattctctggacacactatcacctattacattttactgattaacaaataaattggaatttaaaaatatcgatatcaccatgatttaatccagatctgggattatgtagctaaacattgtgatgattattatttaaaaccattatttaataagagtaaaaatatgtgaatctggatatatttaaaaaaagaaatttgatgcccagataatatattaggcactactgattttttagttaaattgatgcactacacttttgatgtttgaagttacaaacctgtaatttttttgtaaaggaaataattgccaaatacctaggcccattgctgacgattagttctaaaatcttattcctcctcttctcccctcacttttccctacttcctctgcaaaaagatttaacaaatacattcataaggaaatgtgtgttgtaacaaatatattgcaaaaacatagtttgtaaaggcattctataagctatttatgtaaaatcaataaaagttgatcataattaaactgtatcagttgagtattatagcagcacaaagtattctttgtacagattttgtgccaatttgaagccacagaaatgatgtggattgttaattgtgttttagaacatccccggacactcagtgtcacagggggaaagaagtgggtaccacattctgtttatatttcacattttaactagatttgagtgtttttagcaagaaatcagtcttaaaatctaatgtctgggatccagaagaaaatgtctttaatctgtgagttattgtcacaatgtcatcttatttaaatgtaccaattagcattttgtaataggcaaatgtcatttagtgcttttcaccaatcccactcacccccggtgctccgccttgcctaagaaaaagaaattaaggagaagtaaactttatttcctaatataatgtcagctgatatttattgagcttttcctctttgcccagagactaggacccaaagaagttaagtaactattcccaggtttatttctctctcatatgatgtcccatgtggatgtttgtggtcagtggacagctttccacctagtctttctgcgacccaggctccttcctcttggggctctgcctttctctcagtccatagagccctctttgttgaaagagcacataggaaaagaaggaaaagtctgtgtggaaaatgtttctgggtcaggcctggaagtggtgcatatctcttccgcccatgttcctttggacagaactccgtcacatggcccacctagagagattttgggaaatgtgtccagctgtgtgcctgggaggaagggggcaccattttcttgagcagctagacagtttgccgtatttgtggtgttctcctcttgttgatgttgaaatggtgaatgagccataaagtatttcaggttatccacacactaatcatctcagtgtctttaattcttaactccaatatgaatgtttaaagcttcctctagattcttattcctatataactaatagagaagaaaggacagcttcctatggggaagacagaggcttcctcatagatgttaggaataatcaaacttgcccctgccctttcacccgtctcaaattctggtcttttaaagcagcgttatgttaagtagtcctaacattgtaatatacagtactgccacattctcctactttctattagaggaagtcagagaatatttatggaagtgaggacccaaattaccttctacagatgacttttatagttacaggacagaaagtgaaaatcaaggttacgttttctacttttgtggtagaaattgagaagtgggtggatatggttcgagaagacctttcagaaacacagagactgagtctttgtcttccatgctgtctctgcagtactgagtgaatttccttatacccttgtatcatgttttcctcccatcttctagaagctggggacagatttggaagagaattacacaagttcagttttttgatacatggattttacagtgcatgcaggttatttatgtagagaggaggtctgggagaaagatggaaactagggagatgactgagaacaaagatatttgggattaacacagatagaagaaaagtttgaaaccatgagattgtcacagcatgaaaaaagatattcaaagacactaaccaacttgaggggtgcagtggtctgaatgtgtcctccaaaattcaaatgtggaaatgtatttgccagtgagatagtatgtagaggtggggccttgaggaagtgattaagtcatgagggctctgggattaatgacttaaaaagaggtgtgaggcagctgttcagcccttctgtctcctgtcccttttttttttttttttttgagatggagtcttgctctgttgccccaggctggagtgcagtggcgtgatcttggttcactgcaagctccacctcccgggttcacgccattctcctgcctcagcctcccgagtagctgggactacaggtgcccgccaccaccacgcccggctaattttttatatttttagtagagatggggtttcaccgtgttagccaggatggtcttgatctcctgacctcatgatctgcctgcctcggcctcccaaagtgctgggattataggtgtgagccaccatgcccagccccttctgtcccttctaacgtgaggacccagcaacaaggtaccatcttgaaagcagcaactggggactcagcagacaccaaaccaactggtgcttaaccgtgacttcccagcctccagagctgtaagaaaataaatttctattatttatagattacccagttgaagatactttgttaaggcagtacaaatggactaagacaagggggaagaaatttgcattcctgatcttcccaacttcttcaaattcacaacacttgaatgacagtcttatttcagcacttactgctatcacctattacttttatgtgtgtcttacctatttgagatgccagattccttggaagtagagaccgtgtctgaatcatcattgtattaaaccactcatccttaacaaatgcccaagccatggttaaagttcaataaatactttgttgaatttattaataaaatggcagaaatgtcattctcttccatatatgtttaataaatccctgataggtgctaagcactgcactaggtaaaaattctcttctgatgctgtctttttggccaaccatttttttatcatttattcattagctgacatttgctaagtgctttggaggggtcaaaaggggaagtaatgagaaatcaaagatggtccctacatcaaggataaactatctttttttagtcactcaaagtcataaccctttggaaacaaaacccaccagtaccccagattttgaccacagatgaatcagtactacaaggactggttagagggttgaatgaatctgtatactcagcacttaacacagcactctgggtaaaagaaaaaagatcctcaaagatattagttggttacatcaagaaaggacaaacttaggttaatctataacttcatctcagaggaacaggaactttggagataaacagggctctgccacttgcaagttgcaccatccctggtttctccatctgtaaattgattaaaacactgcctatctaataagattaaataagttagaagcattcagttaaatgtcaactgaaactattgttcatgtaaattgtgcttgatgctttttctttctagattcaatgattattgtcattttacctccataggccctcaatagaaatcagttgcagagggcagaagcctagatattttcaccttaaaattggagggtgaaagacattgaggtgaagtagagatagagggtacacagaaaaatcgtataagtaaaactaacatcgttaacattatttactgtaagttatctttgtaagagtggtaaaatacattgtgttgttaaataatttcatttaaaaaatgcatcactttgtgtgtttttatattgctaaaaccataaggccagtctacaaggtttgtagataaaatagaaacataccttccttgaaaagcagaataaattttttaaaggcaggaaggaagtgtttgaaccatgtgtcaacaagctttactgtcaaagcaggcttttggtatgggaagaaaaatacttataaatacttgttttaatatttgctttattaaaatacatttaaaatacagcatttttaaatctctaagctcaacttgaagatataagaacagtaaatttgataaaaatgagaaattacattcccatttctttaacaatttgtaaattccaattatcctgaacatttaataccatttacatattttattaatcacattttcttaaacatttgataagagatttaatattttgatccaactaccaaaaaagcagacttgtgtacttgacagatttttctaaacacttcacaactcacgattcaaacaaagacaaaatagcatatcaaaagttaatcactcagttggaaagcactcataccataggcttttattcatttcttgaataattttgttatatcttcctcttttaggctgcaatgagctataattgcactactgcactccacgctgggtgacagagcaagaccctatctctaaaaataaaaaagtatatatatataaaaatatcttcctctattataatttaactcattaagccatttatttagatgtaaacttgcccccctgacatgtggtatgaaacaaatagaaacctagaaatttagtgcatattcaaatattaagacagacactggtgtggtgacttttgtctgtcgcttcattgggacgttttttctttctgatcaacttaatgaaattataatttactataattaagtgtagccatttttactgtagagttcaatgatctttgatgaacgtgtacacccatgtaaccaccacccccaatcaaagtaaagaacattttcttaccagaataaatttcctctccgtttgcagtcattctccccagccctaggtcaccactgatccaccttctgttactggaaggttagttttcttccctgatttagaatttcatataaattaaatcagatagtatatactcttgtgtttagtttctttagcttaacatgtttagagatatttgctgttgcctgtgtctgtagctttttgttttcattgctgaatagtatttcattgtaatataccacagttggtttatgtatttgctgatgaatatttgtgttatttccagcgtgggattattatgaataaagttgctacaaacatttgtatacaa

SEQ ID NO: 459 - DNA, 1002 bp, Homo sapiens
taaatttctattatttatagattacccagttgaagatactttgttaaggcagtacaaatggactaagacaagggggaagaaatttgcattcctgatcttcccaacttcttcaaattcacaacacttgaatgacagtcttatttcagcacttactgctatcacctattacttttatgtgtgtcttacctatttgagatgccagattccttggaagtagagaccgtgtctgaatcatcattgtattaaaccactcatccttaacaaatgcccaagccatggttaaagttcaataaatactttgttgaatttattaataaaatggcagaaatgtcattctcttccatatatgtttaataaatccctgataggtgctaagcactgcactaggtaaaaattctcttctgatgctgtctttttggccaaccatttttttatcatttattcattagctgacatttgctaagtgctttggaggggtcaaaaggggaagtaatgagaaatcaaagatggtccctacatcaaggataaactatctttttttagtcactcaaagtcataaccctttggaaacaaaacccaccagtaccccagattttgaccacagatgaatcagtactacaaggactggttagagggttgaatgaatctgtatactcagcacttaacacagcactctgggtaaaagaaaaaagatcctcaaagatattagttggttacatcaagaaaggacaaacttaggttaatctataacttcatctcagaggaacaggaactttggagataaacagggctctgccacttgcaagttgcaccatccctggtttctccatctgtaaattgattaaaacactgcctatctaataagattaaataagttagaagcattcagttaaatgtcaactgaaactattgttcatgtaaattgtgcttgatgctttttctttctagattcaatgattattgtcattttacctccataggccctcaatagaaatcagttgc

SEQ ID NO: 460 - DNA, 1463 bp, Homo sapiens
tgaagtagagatagagggtacacagaaaaatcgtataagtaaaactaacatcgttaacattatttactgtaagttatctttgtaagagtggtaaaatacattgtgttgttaaataatttcatttaaaaaatgcatcactttgtgtgtttttatattgctaaaaccataaggccagtctacaaggtttgtagataaaatagaaacataccttccttgaaaagcagaataaattttttaaaggcaggaaggaagtgtttgaaccatgtgtcaacaagctttactgtcaaagcaggcttttggtatgggaagaaaaatacttataaatacttgttttaatatttgctttattaaaatacatttaaaatacagcatttttaaatctctaagctcaacttgaagatataagaacagtaaatttgataaaaatgagaaattacattcccatttctttaacaatttgtaaattccaattatcctgaacatttaataccatttacatattttattaatcacattttcttaaacatttgataagagatttaatattttgatccaactaccaaaaaagcagacttgtgtacttgacagatttttctaaacacttcacaactcacgattcaaacaaagacaaaatagcatatcaaaagttaatcactcagttggaaagcactcataccataggcttttattcatttcttgaataattttgttatatcttcctcttttaggctgcaatgagctataattgcactactgcactccacgctgggtgacagagcaagaccctatctctaaaaataaaaaagtatatatatataaaaatatcttcctctattataatttaactcattaagccatttatttagatgtaaacttgcccccctgacatgtggtatgaaacaaatagaaacctagaaatttagtgcatattcaaatattaagacagacactggtgtggtgacttttgtctgtcgcttcattgggacgttttttctttctgatcaacttaatgaaattataatttactataattaagtgtagccatttttactgtagagttcaatgatctttgatgaacgtgtacacccatgtaaccaccacccccaatcaaagtaaagaacattttcttaccagaataaatttcctctccgtttgcagtcattctccccagccctagggtcaccactgatccaccttctgttactggaaggttagttttcttccctgatttagaatttcatataaattaaatcagatagtatatactcttgtgtttagtttctttagcttaacatgtttagagatatttgctgttgcctgtgtctgtagctttttgttttcattgctgaatagtatttcattgtaatataccacagttggtttatgtatttgctgatgaatatttgtgttatttccagcgtgggattattatgaataaagttgctacaaacatttgtatacaa

SEQ ID NO: 461 - DNA, 313 bp, Homo sapiens
tttttttttttttttttttgagatggagtcttgctctgttgccccaggctggagtgcagtggcgtgatcttggttcactgcaagctccacctcccgggttcacgccattctcctgcctcagcctcccgagtagctgggactacaggtgcccgccaccaccacgcccggctaattttttatatttttagtagagatggggtttcaccgtgttagccaggatggtcttgatctcctgacctcatgatctgcctgcctcggcctcccaaagtgctgggattataggtgtgagccaccatgcccagccccttctgtc

SEQ ID NO: 462 - DNA, 547 bp, Homo sapiens
ggactcagttcaccctgcctgggtgaatattatttttccctcaagatcacaggcctctgagggcagctgctgtgacttcgcatggctttgagctcagaatacatgtgggcacgtgctcctcagtctacagggaaatcacaactatatcatactgcaagtccaaaagaaccagcccaagatttctgcaagggtgccaccaaagtcaatgaggattagctatttacatgcccagtgacaagggacacccttgtttattcttcacgtgactggcctttggctaatttcatccagttacttaacttgagttcttgagtgaactctgctgagcctttccctctgttcctgctgcagtgcgcaataaacgtttggtctttgcccctccaaagctcttcgggaaggtactgtgccatccttgtgtgtatctgagtattttccaacatccaaaacagtctgtcttgcagcttgggttatataatgtatttgaaaacttacttcttgtttctgcttcccaaaaagttacccccaaataaatactgcctaacagtta

SEQ ID NO: 463 - DNA, 440 bp, Homo sapiens
cttccttttagctctcagcttgcctaggtaccctgtaaggtccagtgacaagtcacctcctctgcatgtccatagcaactgccccacaacgtgtcattcaacaaacattcatggtgcacccactacacccctagccttgtgtgtacaacactgcccctcaccatatctcatttaattagaataagccccatatccacaggtccatgcatagaaaacagcgctggaaaggcaccactacatctgacgaaactgaactgtgttcggttagggggtggaggggagtggttggcattttcttctatctactattgtgcattttgcaagtgtcaagtgaacctgttacacttccacaatgagggaaaaatatcagtgttcttttaaaataatgtttggattcctaatttaaataaaacgaactctttggcagctccctgctccta

SEQ ID NO: 464 - DNA, 2184 bp, Homo sapiens
accagctctgcaccagctgcacggagggtgtgctcagcactcggtcgggaagcaggttgatctctttcatgatgttggccaggcgcacaggcagctcctgcctgaggaaggtgaaggaggttttctcacaggcattgctggatcctggcaggagaaagaggggtgagccacagagccacagactatgaaagccaaaggatgtctcggccaggtcagctaaacccttcattaacagggggctcagagagcaagtgacctgcccggggcacacagcaaggctccccatcccctgcagggctcaaacacctacaccccatgcctaacacttcaggaggtgtcatcctctcctcatccccagctgaaccctgcttgcctttaaccacagtggacagggccactcctgggcccatttggagctgcctctggcctcagtcacctcacttctctttccttccctcccagcacactcactttgaggggctgattccaggggacaaaggagcctgggaaacccatccctacctaggactgggctctggctgaggggggctatggctagaccaccactgcaggctcccagtgttgtctctggccagcccacctcacccagcctggcctgaatgcccatgtggggctgctgtgtcttaatgcccatccatggggcaaacgggcctgagaacaggagtccaaatgcctcggtccttgtctggtgtcaagatggaaagggtgggggaccgaatatggccttggcccagggtcaggggccctgggttccagtccatcaggctctgcttccaactctgtcacccaggccatgccatcatccttttgaaggtctcagtttcccccatagtactacaagttgaccaaactctactgtgagcccctcacagctgtgatgtttctgtaattagggtgcagtttgtggggacagctgctgggggctaggggtgggcccaggaggctttcctacatgggggaggctcaagactcaggcagggcaggggtgcaggcagacaagtcctgaggaacaggtgccttatgtctcggctgccacctctctgttcccgtcccatcattgacgcagctgcaacccaagctaggcactatcaactcaactcttgagagactgccccccacccccagtccccagctggcaccatggaaataccacatagacagacagggcccacacaatgcccatttcagctgccacgttggcacagcctccctcctgccccagggccacccccaggttgctggtagtgggcgatcctgacctagcagccctggggcagccaagggaggtataggcggcttgactccacatcacggtgcctggggcccctgcccagctggggagaggctgccaggccggaacagatttgatcttcaagtgtccttgcccactggggcagctagggtccagctccttctgtgggtggatgtctaccagtcagggcactgtctcccaatggcatcttctgaaagagcccccttccccaactgcccctggcttaatctcaccctctgcccaggggtgtctgacccttcatgcccagtccaggtctctctacagatggctgcacctctaaaccctgcctcctcactcccaccagcagacccccggtttcctctggtgggaggaggggcccctactcctccagtcatgaggacaactcccattaaccctttcgcgtctggataccaccctactcccttcctgcagtaacatcacagcttcactgccccttactcttcaagacccttcatgaggcccacgaagaaacctcgggaccgtccttgtaaatgccccccattcccatcagcagccccgtcgagaggccccggccggttcctgcttccccattaactctttcctgcctgtacctttccaaacaacccttctctgtcactcggggcctttcttctcctccgtccccctagcccccggctgcccctcccagcgccccgccggcctccgctgccagccgcctcccgcccactccgtaccgaagtccagaaactgcttcatggacagcggggacggggagaacttgctgaagtgctctatgtacttgggcgcccctgccagggacgcattcttcagcagcgcccacacccagcgcatggctgcggcggccgcgactttggttgtggtccccgcgcgggcagcgctcgcgc

SEQ ID NO: 465 - DNA, 11079 bp, Homo sapiens
cagtatttaaggacaagaatacaccatctccatttatagaaacatttactgaggatgatgaagcttcaagggcttctaagccggatcatatttacatggatgccatgggatttggaatgggcaattgctgtctccaggtatagtttcaaatatacagagaggcaaagtgttccatccatttctgttttttaacttctttatatatgcatgtttcctgttccaaaaatcacattttaatgaggttgaaatggtagctggtatgcctttctgaaaaacaatgaagttatattagtaaattcattggaagctgtctatgactaatagttctacagactctgttgttcaccacaaaggtatatacggtatatatacctttataactgtaatttcagttaacttaaaatgcaatatattctgtcattgtttcccttctctttttatatgcctagtttttactgccatctcgtgacaggctagtgaggtggtttaaatattgttcaaaactctgaaaatgagctctgatggaagtattccaatgattttgtgatccaagggatttgtgcaaagctgtctagcggtacaaaaagaataaatatttagcagcttgtgtttgtcttgcccctgagtaaagtatacaggagcctgtctctgtttacccatttaaaaattttcctggatctgtttaaatgatggtgcccctggcagtgagtgtgtccaagctcacttaggaccagagtggaagagcatggaacccatcaggtggccacacacaagcctgcagttggcttttggctctgtcactactcaggtttttgggcaactccctttacttcttttggctcagatttttcatcagttgaaagaagggctgatattaagtccccttctaggtctgactctaagctaatatttattttattgccttaactaacagaagtaaaagagagaggctgcttgttatttaatgtccaaggaaattttatccagttgtgattacttcagctgattcaaaacagcgtccttagaggcacagggccgtgcagagcctggacccatgtaagatccctctgagccgccagcctgactgctctcagtgcaaagacccagaacccagccttccttcacctgaaacagctgcagcgtgcacacacacttcttgtgcatatatctctggtctatttattttcaaaactaagtataatccaaattgaatgctggaatcagatttttccattctgaatgtgtttaaataacatggccaaggataatttctttctgttttcttgacatttataggtagtataaaatatgtgacttccaaataaacataaaccatcacacttcacgaaaaaagagatctttcgacttttaactgcctgtttcctatcttaattacaagtatttctaaagaaaaccattaagttctagagcttacagtacatggttttaaaattgtataagtgctgttaagagtattgattgccttttcttggtttaatattaaaccagggtgttctgccaaagaccgcatagtttctctgatatggttccaaagggatattctttccactgaaacactgtatgtataccagtaaatgcttcctaatggtagatgataaatatttttgttgcttgtagatagaatttttccatctagtgtaagcttaggattgttttctttttcccagtgacatgtacagtttcactactccacttaaaaaaaatcgttagctcagataaagtgtgtggcacatgaaatgaattttgccaattcaccaccgaaatccctgctttatatctcttcagtggaacactaaaccaacttctttcccaagtacactgatttgatctttacaaattatatgaatgtattaaattatcacatgtgccctgaaactgtgtacatctattatgtatcattagagagatggaaaaaaaaaaaagaaactgcttagtaaagtagaaaaaatagttttaaagtaattttgtaaggctaatggaagacttactgtataaaacaaaaaggattttaaccacattcaaattagtgactgttttggggcttttcaggaatcacttaaaaagcaccaagttcacagccaggcacggtggctcatgcctgtaatcccagcactttgggaggctgaggtgggcagatcacttgaggtcaggagtttgagacaagcctggtcatcatggcaaaatctcatctctactaaaaatacaaaaattagccctggtggcatgtgcctgtaatcccagctactgaggagtctgaggcatgagaaacgcttgaacctgggaggcggaggttgcagtgagccaagatcgtgccactgcattccagcctggggaacagagcaagtctttgtctcaaaaaaaaaaaaaaaaaaagcactaagttcatgacaggttatggtagcccctcccaccccccccccaaagtcatgtgacttcaaatctgggttgtagataaagtttagattagatttttcagtttctaacatatatgttccttagttcctccctccacccccaaccccacccccatcagtttcctagcaacattgtgtgtctccttcatatgatgcctcaaaacgacactagaagcccaaattagtcatgtattcatagctttttaaggtataagaactttttttccttccattaaagccattatccacagtgatgtcctatttaatttgattgcatatcagctgtagactaagaaagctaattactaaatgcatttaaaataactaagtcacttcactgttgtatacttctctggggttgaatttcccaggattcacctacgaattatgtattgtatactaggccatctaagagaagccagttgaaaaactggaaagaaaacctgcttctcatagtatctttttaaaaacaaaaatgacacatactcaaatacctaagagcaacacaaaaaagacctaaaaaatctaagagatgcatgttcaaaataattctttagtcaaaatacttgggaaacatgtagttttttgttttttggtttttttaaaatctcagtgccttgtcagtttggcttttggggtcccggtctttcaggtttctcactatacctttgaccgcatgtcatcctctttagcacccccccccacttttttttttccaagattctcatttgttaagcactaaccaggtatcagatgctgtcctgcgcacttgggatagagaatgggaagaaagatccccgcccttctggagcttctacttcagcaaataagtgcataaagactttgggtaccagctcccatttcctcactgctcatgtaatttcatgccatatgcaaagcgatttccaagttcccacctctttgcagaaactgcccttggtttggttatcagtgacttaattgccaacccttatcaatttgtgtctactttaacctttgaaactcttattctttgatgcctatgacacagcttttctctgtgttgaattaattattaaattagtaatgactagttaatacagtctccacattgacatgaaatgtggttataattgagcaggcaaacttgagtctccaatagacattgctgtggaaaacaaagttgagatctagctaaaaccattggaactaacaggttgagattataacagtaaaatattcacttagctgctgttatttcaagtcttaaacactgaaattatgtcgtgtaccaacactaaattcaagctgtcattaatgaataacaacatgaaattcaaactgtcattattgaataacaacagaggagattaaaactgttcccaacttgcagttattacaaatgtgctaacaaacacaatttgtgttccttgccccttctaccgtcttggaaaaaaaagcaggtttttttttttttggtttctgttgggtaacaaagaatttatgctcaccaagttatatgatcttttctctgcctaactcttaagtgtcctacctaccatccttgtgcaggcttcctgggtgatctccccatcttcaggacattctctgagcctactccccaggtctttctacaactcgggtttttcttctgggcaccagccctgaagacctagccacttagagggcctctttttctgtctgttctcttggcctcgtaagtccatcatgtcatgacacctctttatctctaacctctgaacacccaagccaaaacctaagccatcccctactctcagtctccccttggtcaccagtgcctgctactttgactttagtatcactctccccacatctttcctcagccttttccttgacaggtgcagtattttaactgcttccctgtctttctagtctttcccccttccaagctcttcaccatactgccaccagtgaagtttgaaaacaatagttggccggacgcggtggctcacgcctgtaatcccagcattttgggaggccgaggcaagcagatcatgaggtcaggagatcgagaccatcctggctaacacggtgaaaccccatctctactaaaaatacaaaaacaaaattagccagtcgtggtggtgggcacctgtagtcccagctactcgggaggctgaggcggaagaatggcgtgaacccaggaggtggagctttcagtgagccgagagcgcgccactgcaccccagcctgggcgacagagtgagactccatctcaaaaaaataaaaggaagaaagaaagaaaacaatagttaacatgtccaaatcccttttgcatccctcactgactgaagggataggaaggcaacaagccagtagaagagaaaatgctttgctaaacatcatcgtatgtctgtgtcttatttttcttttttgactatttaatcttatttcacttaggaccttggttatttatattagttgtctataggcagtggaacataattaaataccattttctagttaaattcacctaagacaacttttaaacaaaactcttgcgttaaatgttgccattaatgaagcgttgttaacttgcccctctctgcccagcaccttccttctctgacttcactgcttggggagcatgctaatgattccttggtgttaataactttgcaattcttaaacaggtgacattccaagcctgcagtatatctgaggccagatacctttatgatcagttggctactatctgtccaattgttgtaagtagaaattacctcttattttaaatactacttcgtatgaaataagatagcatgtgcagaatttactgacagtgtgctatttaagtccagttaagacctcagtcagagatggactaatataaatagtatgtaggtttaggtataatgaactgagagtctacactgtagaagtttactcttgctagtacaacattgatttgttaaatgtgaagtttgaatgtggccattttccctcccccatacttcatgtcctcacattagagagaggatgatttaagtgaatcaaacccaaggaactggattcttcctggtatatttcactgtaagataggcacaggtacatgtggtggagctctgtatgggttgcataaacatgctttttgatcagaaatataactgcatggagctttttttagcatgtaagtgacactttgaatttgcaggagctgacttttgtttgtttttagatggctttgagtgctgcatctcccttttaccgaggctatgtgtcagacattgattgtcgctggggagtgatttctgcatctgtagatgatagaactcgggaggagcgaggactggaggtgggaattgtttttccttaatagcccttttaagtcaagcaggtaaaatggatcttttgtaactacttgcaatttcaggatgtctccctgcaatttttatctgaaatggggaaaaagatttggtctaggtggggagttaatttttatcgtatgttgatgtctgtatttgttttagcttcatttaaaattagtagtccgatttttctatattttggaagtgctgatggctgtttttaccaaaaggctttttggtgccacatgagtgttttgtatatggtgctttctgctgtggaaagtataatttgttgtcagagattctttttccatgtaaaaggttaggcattgactaataagggtgagatggcacctcttgtttgcatgttgaactgtaaagtaacccttgcatctctccaacaaggggtgtgcatcagaaccacccatggaaatctttgaaaatagacacccagaccctatcctagacctactaaataagaatctctaggatgggacccgaacaagggtgtttttaaaggagccctcataagtggttttgatattctcaaccagggctatactactactgctctggtcttcatgtaattgttcataaattgttgaacatgctttctaagtagaaataaactttaaaggataattattttgataggtttatcttacgttatagatttatttatttatttgcttttaaccttagtatttattttccctagcttaataagaatgaaagtgatctgcttttaaaagataaaagtatatttaaatcataccagaaaaaaagggtatttaaattgccttcagattttaaaaaacataattttccttaataatactttttagggctcactaactttttttctgtatcttatgttgaggtttttatataattatcatatataaaaatatattccactcattttatatagcatattcatttatatatatttttaatctttagccattgaagaacaataactataggatcagtaaatcccgatatgactcaatagacagctatttatctaagtgtggtgagaaatataatgacatcgacttgacgatagataaagagatctacgaacagctgttgcaggaaggtgggtttctactccatctttctgggtttgaatgtacgcctttagttcttcaaagctcttttacacttttttgctgactcctggtctggtttctatttttagtgcaaagtctttaacttctctcatgaggctacttgttcctaaagtttcaggttccaaatacttgtgagattttcttgatttttagcaaaaggagcttactttggaggtctgtgtctaggtccacaccagtgccccagcaggcattgtgtaagtagtgaataaaacgctgacactcccgcagtgtccgcaggataaaatactgggtgaggtgaggatactaatcaaaccagctatttcaagcttctagacaccctttcttcaaacttcctgagctatcctgtcgtctttctggactaagaggaagtggtatctctcgctttgcagtgagttcccatgtgatctctttttgcaggcattgatcatctcctggcccagcatgttgctcatctctttattagagacccactgacactgtttgaagagaaaatacacctggatgatgctaatgagtctgaccattttgaggtatcttctcagttttatttttatttatttatgtattgacttctgagagtctggaatcctctgttttatatgcatttcacttcacaaaccaacatggggaggcagttttctgtacctgtggagaacacaaaagaaatttcataagactttcatttacccagtgcagtaaagaacttggacaaataaaaaatcggtttcaagtactcttattttacgattcttactgtttatctcactgattctaatttttttttttattgttcagtattttcttatttgcctagtggtgaaaaattcaaacatacactgcacaaaaaataacctgatcagttatttcagtgcttcagacatatcaccttttttttttgtagatagacttctcatagatttatttctgtgtcatgttatatgtagacattgacatatataccttttgaaataccatctatatcccctttctttcccccaccaaactcacaaaaggagatataaatccttccagtcttgccatcgggtcccaagatggtcaggacggagaaagaactctctctcagtgtattgagaaacagctacccttcttaggctcttgggtcatcgaagcagcagcattcccaggagaggaggaagaaaggaaacaactgtcatgtgacagggttctcagatgaaagtgtccagtgtcacctggaaaggcaggctggctcctaaaattctcagggatgaaggtgggggccccgtggctcttcagatgctgctctgtagctgggagatagggagtaggagctgggtgagattaagcttgcagtgatagggcctcatagcttttgttaaacacttggctgttttgttttcctaaaagagcacactcgaagaaaatcttcaattgtacctttttgtctttgtcaattgaaatttggtatggacagtgagcagtcttcttccttaattaaataccagatcatcttaatattttcctggatgtgtgaaaagttggttttcttctctgcttttgtatcacagaatattcagtccacaaattggcagacaatgagatttaagccccctcctccaaactcagacattggatggagagtagaatttcgacccatggaggtaagacacatgcatcagcaagaactgactcaaaagtactctttcgccagctgttcatcacccttctgatgctgctatgagaaggctcttatatataaaataaaaattaagtatgtgcatggtagcaagtcagtccaagttaaggagggttgatttctgagaatagatgtgggcaaagggcttccagacccagatggggaattagaagatggcttgggaatgacatgatctgaggaagggcctgggtcagggaagagcatgtttgtgtagttggttcataacttctctgggcttctgcttgtctaggtgcaattaacagactttgagaactctgcctatgtggtgtttgtggtactgctcaccagagtgatcctttcctacaaattggattttctcattccactgtcaaaggtaaggatatgtttctttatggtgatgggtatagatctatctgtagatatatttatttatatatgctatttatttcccacctgatttcatttgaaattgtttaccctttgcaataaaatgtttctccatcagccctattctttattttcttttaaacctaagcttaatttctagacgctttccattcaagatgattgatggctagaagtagtcctacacattgatttcatccaccacaaaatcccaggttgattacaatgttaaattaggatggggagggaaagtgtaactgctggaatgccggtaaaagtctcctcagtagaactgaacttgagatatttctgaagaattcggatgggattgaactctcagaaaaacaaattggagttaatctgccccccaaaagaccaaaaaacaagctttctgggaggagtttgccagcaaaacaactccaggtgatgagggagcagagctgtgggttgtggagcagtagctgaggaggtgaacgcctttggtttctgggccagggttcctcttggcagagagtggctgggaaaaactgctaaatagagagggccctgccgcaggggttcctggttgagggtttcggggccagagaatggagaagtagggtagccctgtcacagcaaacatggaagcaagaatgaaactgcttagctccagcatctgcccctggggcatctccttcctccatgaggggtttgccagactgtgctcatccccacaccccctgaaggaaatctggctgtcagcccatccctgcctgctcctcacacccagaccaaaggtcacccacagaactctgtgggcccacattgccctcatgcctacctactggggagaccaaatccatctaagagagattccatgtaagctaccagtctaagcctttgcttataaataagaatagatgcttggaaggcaacagaaaattgagaacaattaacagccttaaagagaagggcctactggtcttgcaagggcatactctgtaaagtcaaacttagttacttcaaggaagtaagctgggcccagcgcaaatctataatctctgctcctcaggaggctgaggcaggaggattgcttgaatccaggaattctagtgcagccccgacaacattgccagatcccatctcttgaaaaaaaaagcaactggaaagaattactattttttaaaaaatacttttaaaccttttttagagacagggtctcactatgttgctcaggctggtctcgaactcctgggctgaaatgatcgtcctcctgctgcctcagccttccaggtagctggaattacagacacaaaccaccatgctcagctttggaaagagttcttaaaggaattctaattagtggcctcagacaaattctagagaggttcagtcacatccataaaacaagtattatagattgtgcttatttaatggtgagtattctcaccagtagagcagatgttgaatatccaaggtagtgatttaaaagaccaaatgaagattaatcaccagcaggatggtgaagaaatggaaattatggaaatcctgaagcatggaaagctctggaaaattcaatgtttgtgtaataatttagaagaggagaatagtttatataggaaagatatacaataatcaaagaaataatagaatttttccttaataagtcttccttaaggatgagacaaatatttaactcaaatgtaggcatttattaatctcaaagagaaaattaactgtccggacaggagaaaaaattaggagacatgaaaaggggggaaaatcaactgatattacttttcatttgcaacattaaatgctagatggaaagaagttttcagaatctcgagaggtaaagaattaacaaccacagaattatcttctcagccaaattattctttaaatttcaggtgattctaacaaaactgaatggatcaagttagggctaaaagtatgccagaagtcttatctagtgtcttggtttgtttgggctgctgtaacaaaaataccttacagtgggtggcttataaacaacaggaatgtattgctcacagttctggaggctgggaagttcacgatcaagtcaccggcagtttcggtgtgtggtgagagct

SEQ ID NO: 466 - DNA, 14299 bp, Homo sapiens
cagtatttaaggacaagaatacaccatctccatttatagaaacatttactgaggatgatgaagcttcaagggcttctaagccggatcatatttacatggatgccatgggatttggaatgggcaattgctgtctccaggtatagtttcaaatatacagagaggcaaagtgttccatccatttctgttttttaacttctttatatatgcatgtttcctgttccaaaaatcacattttaatgaggttgaaatggtagctggtatgcctttctgaaaaacatgaagttatattagtaaattcattggaagctgtctatgactaatagttctacagactctgttgttcaccacaaaggtatatacggtatatatacctttataactgtaatttcagttaacttaaaatgcaatatattctgtcattgtttcccttctctttttatatgcctagtttttactgccatctcgtgacaggctagtgaggtggtttaaatattgttcaaaactctgaaaatgagctctgatggaagtattccaatgattttgtgatccaagggatttgtgcaaagctgtctagcggtacaaaaagaataaatatttagcagcttgtgtttgtcttgcccctgagtaaagtatacaggagcctgtctctgtttacccatttaaaaattttcctggatctgtttaaatgatggtgcccctggcagtgagtgtgtccaagctcacttaggaccagagtggaagagcatggaacccatcaggtggccacacaaaagcctgcagttggcttttggctctgtcactactcaggtttttgggcaactccctttacttcttttggctcagatttttcatcagttgaaagaagggctgatattaagtccccttctaggtctgactctaagctaatatttattttattgccttaactaacagaagtaaaagagagaggctgcttgttatttaatgtccaaggaaattttatccagttgtgattacttcagctgattcaaaacagcgtccttagaggcacagggccgtgcagagcctggacccatgtaagacccctctgagccgccagcctgactgctctcagtgcaaagacccagaacccagccttccttcacctgaaacagctgcagcgtgcacacacacttcttgtgcatatatctctggtctatttattttcaaaactaagtataatccaaattgaatgctggaatcagatttttccattctgaatgtgtttaaataacatggccaaggataatttctttctgttttcttgacatttataggtagtataagatatgtgacttccaaataaacataaaccatcacacttcacgaaaaaagagatctttcgacttttaactgcctgtttcctatcttaattacaagtatttctaaagaaaaccattaagttctagagcttacagtacatggttttaaaattgtataagtgctgttaagagtattgattgccttttcttggtttaatattaaaccagggtgttctgccgaagaccgcatagtttctctgatatggttccaaagggatattctttccactgaaacactgtatgtatactagtaaatgcttcctaatggtagatgataaatatttttgttgcttgtagatagaatttttccatctagtgtaagcttaggattgttttctttttcccagtgacatgtacagtttcactactccacttaaaaaaaatcgttagctcagataaagtgtgtggcacatgaaatgaattttgccaattcaccaccgaaatccctgctttatatctcttcagtggaacactaaaccaacttctttcccaagtacactgatttgatctttacaaattatatgaatgtattaaattatcacatgtgccctgaaactgtgtacatctattatgtatcattagagagatggaaaaaaaaaaaagaaactgcttagtaaagtagaaaaaatagttttaaagtaattttgtaaggctaatggaagacttactgtataaagcaaaaaggattttaaccacattcaaattattgactgttttggggcttttcaggaatcacttaaaaagcaccaagttcacagccaggcacggtggctcatgcctgtaatcccagcactttgggaggctgagatgggcagatcacttgaggtcaggagtttgagacaagcctggtcatcatggcaaaatctcatctctactaaaaatacaaaaattagacctggtggcatgtgcctgtaatcccagctactgaggagtctgaggcatgagaaacgcttgaacctgggaggcggaggttgcagtgagccaagatcgtgccactgcattccagcctggggaacagagcaagtctttgtctcaaaaaaaaaaaaaaaaaaagcactaagttcatgacaggttatggtagcccctcccacccccccccccaaagtcatgtgacttcaaatctgggttgtagataaagtttagattagatgtttcagtttctaacatatatgttccttagttcctccctccacccccaaccccacccccatcagtttcctagcaacattgtgtgtctccttcatatgatgcctcaaaacgacactagaagcccaaattagtcatgtattcatagctttttaaggtataagaactttttttccttccattaaagccattatccacagtgatgtcctatttaatttgattgcatatcagctgtagactaagaaagctaattactaaatgcatttaaaataactaagtcacttcactgttgtatacttctctggggttgaatttcccaggattcacctacgaattatgtattgtatactaggccatctaagagaagccagttgaaaaactggaaagaaaacctgcttctcatagtatctttttaaaaacaaaaatgacacatactcaaatacctaagagcaacacaaaaaagacctaaaaaatctaagagatgcatgttcaaaataattctttagtcaaaatacttgggaaacatgtagttttttgttttttggtttttttaaaatctcaatgccttgtcagtttggcttttggggtcccggtctttcaggtttctcactatacctttgaccgcatgtcatcctctttagcaccccccccccacttttttttttccaagattctcatttgttaagcactaaccaggtatcagatgctgtcctgcgcacttgggatagagaatgggaagaaagatccccgcccttctggagcttctacttcagcaaataagtgcataaagactttgggtaccagctcccatttcctcactgctcatgtaatttcatgccatatgcaaagcgatttccaagttcccacctctttgcagaaactgcccttggtttggttatcagtgacttaattgccaacccttatcaatttgtgtctactttaacctttgaaactcttattctttgatgcctatgacacagcttttctctgtgttgaattaattattaaattagtaatgactagttaatacagtctccacattgacatgaaatgtggttataattgagcaggcaaacttgagtctccaatagacattgctgtggaaaacaaagttgagatctagctaaaaccattggaactaacaggttgagattataacagtaaaatattcacttagctgctgttatttcaagtcttaaacactgaaattatgtcgtgtaccaacactaaattcaagctgtcattaatgaataacaacatgaaattcaaactgtcattattgaataacaacagaggagattaaaactgttcccaacttgcagttattacaaatgtgctaacaaacacaatttgtgttccttgccccttctaccgtcttggaaaaaaaagcaggtttttttttttttggtttctgttgggtaacaaagaatttatgctcaccaagttatatgatcttttctctgcctaactcttaagtgtcctacctaccatccttgtgcaggcttcctgggtgatctccccatcttcaggacattctctgagcctactccccaggtctttctacaactcgggtttttcttctgggcaccagccctgaagacctagccacttagagggcctctttttctgtctgttctcttggcctcgtaagtccatcatgtcatgacacctctttatctctaacctctgaacacccaagccaaaacctaagccatcccctactctcagtctccccttggtcaccagtgcctgctactttgactttagtatcactctccccacatctttcctcagccttttccttgacaggtgcagtattttaactgcttccctgtctttctagtctttcccccttccaagctcttcaccatactgccaccagtgaagtttgaaaacaatagttggccggacgcggtggctcacgcctgtaatcccagcattttgggaggccgaggcaagcagatcatgaggtcaggagatcgagaccatcctggctaacacggtgaaaccccatctctactaaaaatacaaaaacaaaattagccagtcgtggtggtgggcacctgtagtcccagctactcgggaggctgaggcggaagaatggcgtgaacccaggaggtggagctttcagtgagccgagagcgcgccactgcaccccagcctgggcgacagagtgagactccatctcaaaaaaataaaaggaagaaagaaagaaaacaatagttaacatgtccaaatcccttttgcatccctcactgactgaagggataggaaggcaacaagccagtagaagagaaaatgctttgctaaacatcatcgtatgtctgtgtcttatttttcttttttgactatttaatcttatttcacttaggaccttggttatttatattagttgtctataggcagtggaacataattaaataccattttctagttaaattcacctaagacaacttttaaacaaaactcttgcgttaaatgttgccattaatgaagcgttgttaacttgcccctctctgcccagcaccttccttctctgacttcactgcttggggagcatgctaatgattccttggtgttaataactttgcaattcttaaacaggtgacattccaagcctgcagtatatctgaggccagatacctttatgatcagttggctactatctgtccaattgttgtaagtagaaattacctcttattttaaatactacttcgtatgaaataagatagcatgtgcagaatttactgacagtgtgctatttaagtccagttaagacctcagtcagagatggactaatataaatagtatgtaggtttaggtataatgaactgagagtctacactgtagaagtttactcttgctagtacaacattgatttgttaaatgtgaagtttgaatgtggccattttccctcccccatacttcatgtcctcacattagagagaggatgatttaagtgaatcaaacccaaggaactggattcttcctggtatatttcactgtaagataggcacaggtacatgtgctctgtatgggttgcataaacatgctttttgatcagaaatataactgcatggagctttttttagcatgtaagtgacactttgaatttgcaggagctgacttttgtttgtttttagatggctttgagtgctgcatctcccttttaccgaggctatgtgtcagacattgattgtcgctggggagtgatttctgcatctgtagatgatagaactcgggaggagcgaggactggaggtgggaattgtttttccttaatagcccttttaagtcaagcaggtaaaatggatcttttgtaactacttgcaatttcaggatgtctccctgcaatttttatctgaaatggggaaaaagatttggtctaggtggggagttaatttttatcgtatgttgatgtctgtatttgttttagcttcatttaaaattagtagtccgatttttctatattttggaagtgctgatggctgtttttaccaaaaggctttttggtgccacatgagtgttttgtatatggtgctttctgctgtggaaagtataatttgttgtcagagattctttttccatgtaaaaggttaggcattgactaataagggtgagatggcacctcttgtttgcatgttgaactgtaaagtaacccttgcatctctccaacaaggggtgtgcatcagaaccacccatggaaatctttgaaaatagacacccagaccctatcctagacctactaaataagaatctctaggatgggacccgaacaagggtgtttttaaaggagccctcataagtggttttgatattctcaaccagggctatactactactgctctggtcttcatgtaattgttcataaattgttgaacatgctttctaagtagaaataaactttaaaggataattattttgataggtttatcttacgttatagatttatttatttatttgcttttaaccttagtatttattttccctagcttaataagaatgaaagtgatctgcttttaaaagataaaagtatatttaaatcataccagaaaaaaagggtatttaaattgccttcagattttaaaaaacataattttccttaataatactttttagggctcactaactttttttctgtatcttatgttgaggtttttatataattatcatatataaaaatatattccactcattttatatagcatattcatttatatatatttttaatctttagccattgaagaacaataactataggatcagtaaatcccgatatgactcaatagacagctatttatctaagtgtggtgagaaatataatgacatcgacttgacgatagataaagagatctacgaacagctgttgcaggaaggtgggtttctactccatctttctgggtttgaatgtacgcctttagttcttcaaagctcttttacacttttttgctgactcctggtctggtttctatttttagtgcaaagtctttaacttctctcatgaggctacttgttcctaaagtttcaggttccaaatacttgtgagattttcttgatttttagcaaaaggagcttactttggaggtctgtgtctaggtccacaccagtgccccagcaggcattcctgtaagcagtgaataaaacgctgacactcccgcagtgtccgcagtaaaaatactgggtgaggtgaggatactaatcaaaccagctatttcaagcttctagacaccctttcttcaaacttcctgagctatcctgtcgtctttctggactaagaggaagtggtatctctcgctttgcagtgagttcccatgtgatctctttttgcaggcattgatcatctcctggcccagcatgttgctcatctctttattagagacccactgacactgtttgaagagaaaatacacctggatgatgctaatgagtctgaccattttgaggtatcttctcagttttatttttatttatttatgtattgacttctgagagtctggaatcctctgttttatatgcatttcacttcacaaaccaacatggggaggcagttttctgtacctgtggagaacacaaaagaaatttcataagactttcatttacccagtgcagtaaagaacttggacaaataaaaaatcggtttcaagtactcttattttacgattcttactgtttatctcactgattctaatttttttttttattgttcagtattttcttatttgcctagtggtgaaaaattcaaacatacactgcacaaaaaataacctgatcagttatttcagtgcttcagacatatcaccttttttttttgtagatagacttctcatagatttatttctgtgtcatgttatatgtagacattgacatatataccttttgaaataccatctatatcccctttctttcccccaccaaactcacaaaaggagatataaatccttccagtcttgccatcgggtcccaagatggtcaggacggagaaagaactctctctcagtgtattgagaaacagctacccttcttaggctcttgggtcatcgaagcagcagcattcccaggagaggaggaagaaaggaaacaactgtcatgtgacagggttctcagatgaaagtgtccagtgtcacctggaaaggcaggctggctcctaaaattctcagggatgaaggtgggggccccgtggctcttcagatgctgctctgtagctgggagatagggagtaggagctgggtgagattaagcttgcagtgatagggcctcatagcttttgttaaacacttggctgttttgttttcctaaaagagcacactcgaagaaaatcttcaattgtacctttttgtctttgtcaattgaaatttggtatggacagtgagcagtcttcttccttaattaaataccagatcatcttaatattttcctggatgtgtgaaaagttggttttcttctctgcttttgtatcacagaatattcagtccacaaattggcagacaatgagatttaagccccctcctccaaactcagacattggatggagagtagaatttcgacccatggaggtaagacacatgcatcagcaagaactgactcaaaagtactctttcgccagctgttcatcacccttctgatgctgctatgagaaggctcttatatataaaataaaaattaagtatgtgcatggtagcaagtcagtccaagttaaggagggttgatttctgagaatagatgtgggcaaagggcttccagacccagatggggaattaggagatggcttgggaatgacatgatctgaggaagggcctgggtcagggaagagcatgtttgtgtagttggttcataacttctctgggcttctgcttgtctaggtgcaattaacagactttgagaactctgcctatgtggtgtttgtggtactgctcaccagagtgatcctttcctacaaattggattttctcattccactgtcaaaggtaaggatatgtttctttatggtgatgggtatagatctatctgtagatatatttatttatatatgctatttatttcccacctaatttcatttgaaattgtttaccctttgcaataaaatgtttctccatcagccctattctttattttcttttaaacctaagcttaatttctagacgctttccattcaagatgattgatggctagaagtagtcctacacattgatttcatccaccacaaaatcccaggttgattacaatgttaaattaggatggggagggaaagtgtaactgctggaatgccggtaaaagtctcctcagtagaactgaacttgagatatttctgaagaattcggatgggattgaactctcagaaaaacaaattggagttaatctgccccccaaaagaccaaaaaacaagctttctgggaggagtttgccagcaaaacaactccaggtgatgagggagcagagctgtgggttgtggagcagtagctgaggaggtgaacgcctttggtttctgggccagggttcctcttggcagagagtggctgggaaaaactgctaaatagagagggccctgccgcaggggttcctggttgagggtttcggggccagagaatggagaagtagggtagccctgtcacagcaaacatggaagcaagaatgaaactgcttagctccagcatctgcccctggggcatctccttcctccatgaggggtttgccagactgtgctcatccccacaccccctgaaggaaatctggctgtcagcccatccctgcctgctcctcacacccagaccaaaggtcacccacagaactctgtgggcccacattgccctcatgcctacctactggggagaccaaatccatctaagagagattccatgtaagctaccagtctaagcctttgcttataaataagaatagatgcttggaaggcaacagaaaattgagaacaattaacagccttaaagagaagggcctactggtcttgcaagggcatactctgtaaagtcaaacttagttacttcaaggaagtaagctgggcccagcgcaaatctataatctctgctcctcaggaggctgaggcaggaggattgcttgaatccaggaattctagtgcagccccgacaacattgccagatcccatctcttgaaaaaaaaaagcaactggaaagaattactattttttaaaaaatactttttaaccctttttagagacaggggctcactatggttgctcaggctggtctcgaactcctgggctgaaatgattgttctcctgctggctcagccttccaggtagctggaattacagacacaaaccaccatgctcagctttgggaagagttcttaaaggaattctaattagtggcctcagacaaattctagagaggttcagtcacatccataaaacaagtattatagattgtgcttatttaatggtgagtattctcaccagtagagcagatgttgaatatccaaggtagtgatttaaaagaccaaatgaagattaatcccagcaggatggtgaagaaatggaaattatggaaatcctgaagcatggaaagctctggaaaattcaatgtttgtgtaataatttagaagaggagaatagtttatataggaaagatatacaataatcaaagaaataatagaatttttccttaataagtcttccttaaggatgagacaaatatttaactcaaatgtaggcatttattaatctcaaagagaaaattaactgtccggacaggagaaaaaattaggagacatgaaaaggggggaaaatcaactgatattacttttcatttgcaacattaaatgctagatggaaagaagttttcagaatctcgagaggtaaagaattaacaaccacagaattatcgtctcagccaaattattctttaaatttcaggtgattctaacaaaactgaatggatcaagttagggctaaaagtatgccagaagtcttatctagtgtcttggtttgtttgggctgctgtaacaaaaataccttacagtgggtggcttataaacaacaggaatgtattgctcacagttctggaggctgggaagttcacgatcaagtcaccggcagtttcggtgtgtggtgagagcttttgctctctggttcatacatggtgccttcttgctgtgttcttacatggtggaaggagctaactagctcttcagatgtctcttcgtaataccagttatgagggtagggccttcatgacctcccaaaggaggtcctcccaattgcctcccaaaggccctactttctaatactgtcacaatgggcattaggcgtcagtgtatgaatttaagggaacacagacattcagaccatagcaccttgtaaggggatatggaaggagatgaatggtagatactcattagtgcttgacacttagagagttataatttcaaaactacctctttaaggaaaactattaatagtatagaaacaggatttattacttttaaacttgctggcgaaagggtggcaaaatgaaccacaaatacatttcagtgccacaaaattgggtgtggggccaggggagtgatgaaacaatagcccatagaacataaagtggtgaaaataaaatgaaaacaaatttgaatagactaaactctatcctattaaacagctgaaacagataatataaaatagcaacacagtttgcataagatgtacgtagaacaaggacagatgccgacaagagctgcatagtgaccttttggaatgatagcaggaatggcaaagcaatatcaggcaaaatgtgaggtagaaattattaaatgggatagagaaagcagttttatatattcttccaagatgatgtgaaagctgtggtcctttttgtaccatgaaatgtaacatgaaaagagtttagtgtgatgggtaatacatggctttgatgtgagaactaaatgcataaatccctggtactatttactaggcttttaacctggacaagtgacttattctcagtgcctcagtttcccacatgtatcccagaggggaataagtaggctgttgtaagcccgtgtggggattaatggaggtaaaccacttaacagagtaccttgcatgttactcagtaactgacaggccatataatcaaaggatgggaaaggccatgggggaattaaaggcatggttaataagcttggttgtatgcgtatattacgtatctcataccacatcttttttcaaatgccatgagtaagatttacaaaaattaaagaaaatcttcacttctcaaaagtagacataatacagcatgcgttcccgctaaaattcaacgaaagagatactctggagaaatttaacattggaaattaaaaatgtctttccaagtagattttagattaaccaaaactagaattacagattgtgtaggaaagtgaaagacatgctggcagagctgatgtctaaggaaaaattatagctttaaatgtcttaacaaaaagattttaaatctaagtcattgagtatctaaagagcaaagtaaaatatactttgaaaggaagtcatcaaagcacaaattataagtggtcgttatgaacttttttcaagactaaggaaaaaagaaacaaatattaataatgaaagcagatgttcacagccatggtggaatgtatactatttatttgagtatgctcctagagtatctagattcttcagaaggtcctgtgtgtctcttaaaaaatgaaaccataacaatcgcactccctgcataatgaatatgggaggagacttggtaatcaagagagcttatgtaccatctgtcccatgtcagcctggccctctaactggtcactgttgtatatattgaggtcccacataagatttcattatagaaaataagggattactactaaaacgttttttaaattctgctttgagagtcttaaaaagtcattggagatacagagaattcacaaataaaacagttttcggtttcatgagtgagtctacatgtccggaggcaccagatgggtaaaacagcagtgatcttctgcccttgggagggctgtaaccttattccagatatgacaacctatgaactgtctttgcctttcctcactaaagtggggaggcaaaaccccaatggcgaggcagcaggggaagagcactcaacttagaagaaccgggttataggccgggcgcggtggctcacgcctgtaatcccagcactttgggagtctgaagcgggcagatcacttgaggtcaggagttcgaaaccagcctggccaacatggtgaaaccccgtctctactaaaaatacaaaaaaattagccgagtgtggtggtgcaggcctgtaatcccagctgcttgggaggctgaggcacaaagaattgcttgaacccaggagacagaggttggggtgagatgagattgcaccactgcactccaacctgggcaacagagcgagactccatctcaaaaaaacagaagaagaactgggttctagtcctgccttctgccttcgttaccctgggactcctggtgagacactgctatataaagggaaccagccacctgccctcccaacactgtatatctgttgcaaggctcagtcacagaggtgctttgaaatgcagacgttccacatgaatataagttttgggttttaagtttctcttaaaattccctgattggttgaaaaatcacataccaatccatgattgagtgatacagtcctcacataaataaaaagcctgttcctcccactgggaagcatttgagcagaaagtagaatccctaagggaatgagtcctaattgcaaaggtgaggaaggtgctgcaacttgtatgtctgatcaagaatattttgacttagtcgtgattctttttttcccttaggttgatgagaacatgaaggtagcacagaaaagagatgctgtcttgcagggaatgttttatttcaggaaagatatttgcaaaggtattacattatcttagatttctaatgtcagcttatgctgcaacaagctgctaaagctcccctgaccctcttctccggcaggtggcaatgcagtggtggatggttgtggcaaggcccagaacagcacggagctcgctgcagaggagtacaccctcatgagcatagacaccatcatcaatgggaaggtaggagggtggccctgtacagtacgcctcactgtgcacatcccccggcagggagttcataaagtgtcctgcttcttgtaggaaggtgtgtttcctggactgatcccaattctgaactcttaccttgaaaacatggaagtggatgtggacaccagatgtagtattctgaactacctaaagctaattaagaagagagcatctggt

SEQ ID NO: 467 - DNA, 17000 bp, Homo sapiens
cagtatttaaggacaagaatacaccatctccatttatagaaacatttactgaggatgatgaagcttcaagggcttctaagccggatcatatttacatggatgccatgggatttggaatgggcaattgctgtctccaggtatagtttcaaatatacagagaggcaaagtgttccatccatttctgttttttaacttctttatatatgcatgtttcctgttccaaaaatcacattttaatgaggttgaaatggtagctggtatgcctttctgaaaaacatgaagttatattagtaaattcattggaagctgtctatgactaatagttctacagactctgttgttcaccacaaaggtatatacggtatatatacctttataactgtaatttcagttaacttaaaatgcaatatattctgtcattgtttcccttctctttttatatgcctagtttttactgccatctcgtgacaggctagtgaggtggtttaaatattgttcaaaactctgaaaatgagctctgatggaagtattccaatgattttgtgatccaagggatttgtgcaaagctgtctagcggtacaaaaagaataaatatttagcagcttgtgtttgtcttgcccctgagtaaagtatacaggagcctgtctctgtttacccatttaaaaattttcctggatctgtttaaatgatggtgcccctggcagtgagtgtgtccaagctcacttaggaccagagtggaagagcatggaacccatcaggtggccacacaaaagcctgcagttggcttttggctctgtcactactcaggtttttgggcaactccctttacttcttttggctcagatttttcatcagttgaaagaagggctgatattaagtccccttctaggtctgactctaagctaatatttattttattgccttaactaacagaagtaaaagagagaggctgcttgttatttaatgtccaaggaaattttatccagttgtgattacttcagctgattcaaaacagcgtccttagaggcacagggccgtgcagagcctggacccatgtaagacccctctgagccgccagcctgactgctctcagtgcaaagacccagaacccagccttccttcacctgaaacagctgcagcgtgcacacacacttcttgtgcatatatctctggtctatttattttcaaaactaagtataatccaaattgaatgctggaatcagatttttccattctgaatgtgtttaaataacatggccaaggataatttctttctgttttcttgacatttataggtagtataagatatgtgacttccaaataaacataaaccatcacacttcacgaaaaaagagatctttcgacttttaactgcctgtttcctatcttaattacaagtatttctaaagaaaaccattaagttctagagcttacagtacatggttttaaaattgtataagtgctgttaagagtattgattgccttttcttggtttaatattaaaccagggtgttctgccgaagaccgcatagtttctctgatatggttccaaagggatattctttccactgaaacactgtatgtatactagtaaatgcttcctaatggtagatgataaatatttttgttgcttgtagatagaatttttccatctagtgtaagcttaggattgttttctttttcccagtgacatgtacagtttcactactccacttaaaaaaaatcgttagctcagataaagtgtgtggcacatgaaatgaattttgccaattcaccaccgaaatccctgctttatatctcttcagtggaacactaaaccaacttctttcccaagtacactgatttgatctttacaaattatatgaatgtattaaattatcacatgtgccctgaaactgtgtacatctattatgtatcattagagagatggaaaaaaaaaaaagaaactgcttagtaaagtagaaaaaatagttttaaagtaattttgtaaggctaatggaagacttactgtataaagcaaaaaggattttaaccacattcaaattattgactgttttggggcttttcaggaatcacttaaaaagcaccaagttcacagccaggcacggtggctcatgcctgtaatcccagcactttgggaggctgagatgggcagatcacttgaggtcaggagtttgagacaagcctggtcatcatggcaaaatctcatctctactaaaaatacaaaaattagacctggtggcatgtgcctgtaatcccagctactgaggagtctgaggcatgagaaacgcttgaacctgggaggcggaggttgcagtgagccaagatcgtgccactgcattccagcctggggaacagagcaagtctttgtctcaaaaaaaaaaaaaaaaaaagcactaagttcatgacaggttatggtagcccctcccacccccccccccaaagtcatgtgacttcaaatctgggttgtagataaagtttagattagatgtttcagtttctaacatatatgttccttagttcctccctccacccccaaccccacccccatcagtttcctagcaacattgtgtgtctccttcatatgatgcctcaaaacgacactagaagcccaaattagtcatgtattcatagctttttaaggtataagaactttttttccttccattaaagccattatccacagtgatgtcctatttaatttgattgcatatcagctgtagactaagaaagctaattactaaatgcatttaaaataactaagtcacttcactgttgtatacttctctggggttgaatttcccaggattcacctacgaattatgtattgtatactaggccatctaagagaagccagttgaaaaactggaaagaaaacctgcttctcatagtatctttttaaaaacaaaaatgacacatactcaaatacctaagagcaacacaaaaaagacctaaaaaatctaagagatgcatgttcaaaataattctttagtcaaaatacttgggaaacatgtagttttttgttttttggtttttttaaaatctcaatgccttgtcagtttggcttttggggtcccggtctttcaggtttctcactatacctttgaccgcatgtcatcctctttagcaccccccccccacttttttttttccaagattctcatttgttaagcactaaccaggtatcagatgctgtcctgcgcacttgggatagagaatgggaagaaagatccccgcccttctggagcttctacttcagcaaataagtgcataaagactttgggtaccagctcccatttcctcactgctcatgtaatttcatgccatatgcaaagcgatttccaagttcccacctctttgcagaaactgcccttggtttggttatcagtgacttaattgccaacccttatcaatttgtgtctactttaacctttgaaactcttattctttgatgcctatgacacagcttttctctgtgttgaattaattattaaattagtaatgactagttaatacagtctccacattgacatgaaatgtggttataattgagcaggcaaacttgagtctccaatagacattgctgtggaaaacaaagttgagatctagctaaaaccattggaactaacaggttgagattataacagtaaaatattcacttagctgctgttatttcaagtcttaaacactgaaattatgtcgtgtaccaacactaaattcaagctgtcattaatgaataacaacatgaaattcaaactgtcattattgaataacaacagaggagattaaaactgttcccaacttgcagttattacaaatgtgctaacaaacacaatttgtgttccttgccccttctaccgtcttggaaaaaaaagcaggtttttttttttttggtttctgttgggtaacaaagaatttatgctcaccaagttatatgatcttttctctgcctaactcttaagtgtcctacctaccatccttgtgcaggcttcctgggtgatctccccatcttcaggacattctctgagcctactccccaggtctttctacaactcgggtttttcttctgggcaccagccctgaagacctagccacttagagggcctctttttctgtctgttctcttggcctcgtaagtccatcatgtcatgacacctctttatctctaacctctgaacacccaagccaaaacctaagccatcccctactctcagtctccccttggtcaccagtgcctgctactttgactttagtatcactctccccacatctttcctcagccttttccttgacaggtgcagtattttaactgcttccctgtctttctagtctttcccccttccaagctcttcaccatactgccaccagtgaagtttgaaaacaatagttggccggacgcggtggctcacgcctgtaatcccagcattttgggaggccgaggcaagcagatcatgaggtcaggagatcgagaccatcctggctaacacggtgaaaccccatctctactaaaaatacaaaaacaaaattagccagtcgtggtggtgggcacctgtagtcccagctactcgggaggctgaggcggaagaatggcgtgaacccaggaggtggagctttcagtgagccgagagcgcgccactgcaccccagcctgggcgacagagtgagactccatctcaaaaaaataaaaggaagaaagaaagaaaacaatagttaacatgtccaaatcccttttgcatccctcactgactgaagggataggaaggcaacaagccagtagaagagaaaatgctttgctaaacatcatcgtatgtctgtgtcttatttttcttttttgactatttaatcttatttcacttaggaccttggttatttatattagttgtctataggcagtggaacataattaaataccattttctagttaaattcacctaagacaacttttaaacaaaactcttgcgttaaatgttgccattaatgaagcgttgttaacttgcccctctctgcccagcaccttccttctctgacttcactgcttggggagcatgctaatgattccttggtgttaataactttgcaattcttaaacaggtgacattccaagcctgcagtatatctgaggccagatacctttatgatcagttggctactatctgtccaattgttgtaagtagaaattacctcttattttaaatactacttcgtatgaaataagatagcatgtgcagaatttactgacagtgtgctatttaagtccagttaagacctcagtcagagatggactaatataaatagtatgtaggtttaggtataatgaactgagagtctacactgtagaagtttactcttgctagtacaacattgatttgttaaatgtgaagtttgaatgtggccattttccctcccccatacttcatgtcctcacattagagagaggatgatttaagtgaatcaaacccaaggaactggattcttcctggtatatttcactgtaagataggcacaggtacatgtgctctgtatgggttgcataaacatgctttttgatcagaaatataactgcatggagctttttttagcatgtaagtgacactttgaatttgcaggagctgacttttgtttgtttttagatggctttgagtgctgcatctcccttttaccgaggctatgtgtcagacattgattgtcgctggggagtgatttctgcatctgtagatgatagaactcgggaggagcgaggactggaggtgggaattgtttttccttaatagcccttttaagtcaagcaggtaaaatggatcttttgtaactacttgcaatttcaggatgtctccctgcaatttttatctgaaatggggaaaaagatttggtctaggtggggagttaatttttatcgtatgttgatgtctgtatttgttttagcttcatttaaaattagtagtccgatttttctatattttggaagtgctgatggctgtttttaccaaaaggctttttggtgccacatgagtgttttgtatatggtgctttctgctgtggaaagtataatttgttgtcagagattctttttccatgtaaaaggttaggcattgactaataagggtgagatggcacctcttgtttgcatgttgaactgtaaagtaacccttgcatctctccaacaaggggtgtgcatcagaaccacccatggaaatctttgaaaatagacacccagaccctatcctagacctactaaataagaatctctaggatgggacccgaacaagggtgtttttaaaggagccctcataagtggttttgatattctcaaccagggctatactactactgctctggtcttcatgtaattgttcataaattgttgaacatgctttctaagtagaaataaactttaaaggataattattttgataggtttatcttacgttatagatttatttatttatttgcttttaaccttagtatttattttccctagcttaataagaatgaaagtgatctgcttttaaaagataaaagtatatttaaatcataccagaaaaaaagggtatttaaattgccttcagattttaaaaaacataattttccttaataatactttttagggctcactaactttttttctgtatcttatgttgaggtttttatataattatcatatataaaaatatattccactcattttatatagcatattcatttatatatatttttaatctttagccattgaagaacaataactataggatcagtaaatcccgatatgactcaatagacagctatttatctaagtgtggtgagaaatataatgacatcgacttgacgatagataaagagatctacgaacagctgttgcaggaaggtgggtttctactccatctttctgggtttgaatgtacgcctttagttcttcaaagctcttttacacttttttgctgactcctggtctggtttctatttttagtgcaaagtctttaacttctctcatgaggctacttgttcctaaagtttcaggttccaaatacttgtgagattttcttgatttttagcaaaaggagcttactttggaggtctgtgtctaggtccacaccagtgccccagcaggcattgtgtaagtagtgaataaaacgctgacactcccgcagtgtccgcaggataaaatactgggtgaggtgaggatactaatcaaaccagctatttcaagcttctagacaccctttcttcaaacttcctgagctatcctgtcgtctttctggactaagaggaagtggtatctctcgctttgcagtgagttcccatgtgatctctttttgcaggcattgatcatctcctggcccagcatgttgctcatctctttattagagacccactgacactgtttgaagagaaaatacacctggatgatgctaatgagtctgaccattttgaggtatcttctcagttttatttttatttatttatgtattgacttctgagagtctggaatcctctgttttatatgcatttcacttcacaaaccaacatggggaggcagttttctgtacctgtggagaacacaaaagaaatttcataagactttcatttacccagtgcagtaaagaacttggacaaataaaaaatcggtttcaagtactcttattttacgattcttactgtttatctcactgattctaatttttttttttattgttcagtattttcttatttgcctagtggtgaaaaattcaaacatacactgcacaaaaaataacctgatcagttatttcagtgcttcagacatatcaccttttttttttgtagatagacttctcatagatttatttctgtgtcatgttatatgtagacattgacatatataccttttgaaataccatctatatcccctttctttcccccaccaaactcacaaaaggagatataaatccttccagtcttgccatcgggtcccaagatggtcaggacggagaaagaactctctctcagtgtattgagaaacagctacccttcttaggctcttgggtcatcgaagcagcagcattcccaggagaggaggaagaaaggaaacaactgtcatgtgacagggttctcagatgaaagtgtccagtgtcacctggaaaggcaggctggctcctaaaattctcagggatgaaggtgggggccccgtggctcttcagatgctgctctgtagctgggagatagggagtaggagctgggtgagattaagcttgcagtgatagggcctcatagcttttgttaaacacttggctgttttgttttcctaaaagagcacactcgaagaaaatcttcaattgtacctttttgtctttgtcaattgaaatttggtatggacagtgagcagtcttcttccttaattaaataccagatcatcttaatattttcctggatgtgtgaaaagttggttttcttctctgcttttgtatcacagaatattcagtccacaaattggcagacaatgagatttaagccccctcctccaaactcagacattggatggagagtagaatttcgacccatggaggtaagacacatgcatcagcaagaactgactcaaaagtactctttcgccagctgttcatcacccttctgatgctgctatgagaaggctcttatatataaaataaaaattaagtatgtgcatggtagcaagtcagtccaagttaaggagggttgatttctgagaatagatgtgggcaaagggcttccagacccagatggggaattaggagatggcttgggaatgacatgatctgaggaagggcctgggtcagggaagagcatgtttgtgtagttggttcataacttctctgggcttctgcttgtctaggtgcaattaacagactttgagaactctgcctatgtggtgtttgtggtactgctcaccagagtgatcctttcctacaaattggattttctcattccactgtcaaaggtaaggatatgtttctttatggtgatgggtatagatctatctgtagatatatttatttatatatgctatttatttcccacctaatttcatttgaaattgtttaccctttgcaataaaatgtttctccatcagccctattctttattttcttttaaacctaagcttaatttctagacgctttccattcaagatgattgatggctagaagtagtcctacacattgatttcatccaccacaaaatcccaggttgattacaatgttaaattaggatggggagggaaagtgtaactgctggaatgccggtaaaagtctcctcagtagaactgaacttgagatatttctgaagaattcggatgggattgaactctcagaaaaacaaattggagttaatctgccccccaaaagaccaaaaaacaagctttctgggaggagtttgccagcaaaacaactccaggtgatgagggagcagagctgtgggttgtggagcagtagctgaggaggtgaacgcctttggtttctgggccagggttcctcttggcagagagtggctgggaaaaactgctaaatagagagggccctgccgcaggggttcctggttgagggtttcggggccagagaatggagaagtagggtagccctgtcacagcaaacatggaagcaagaatgaaactgcttagctccagcatctgcccctggggcatctccttcctccatgaggggtttgccagactgtgctcatccccacaccccctgaaggaaatctggctgtcagcccatccctgcctgctcctcacacccagaccaaaggtcacccacagaactctgtgggcccacattgccctcatgcctacctactggggagaccaaatccatctaagagagattccatgtaagctaccagtctaagcctttgcttataaataagaatagatgcttggaaggcaacagaaaattgagaacaattaacagccttaaagagaagggcctactggtcttgcaagggcatactctgtaaagtcaaacttagttacttcaaggaagtaagctgggcccagcgcaaatctataatctctgctcctcaggaggctgaggcaggaggattgcttgaatccaggaattctagtgcagccccgacaacattgccagatcccatctcttgaaaaaaaaaagcaactggaaagaattactattttttaaaaaatacttttaaaccttttttagagacagggtctcactatgttgctcaggctggtctcgaactcctgggctgaaatgatcgtcctcctgctgcctcagccttccaggtagctggaattacagacacaaaccaccatgctcagctttggaaagagttcttaaaggaattctaattagtggcctcagacaaattctagagaggttcagtcacatccataaaacaagtattatagattgtgcttatttaatggtgagtattctcaccagtagagcagatgttgaatatccaaggtagtgatttaaaagaccaaatgaagattaatcccagcaggatggtgaagaaatggaaattatggaaatcctgaagcatggaaagctctggaaaattcaatgtttgtgtaataatttagaagaggagaatagtttatataggaaagatatacaataatcaaagaaataatagaatttttccttaataagtcttccttaaggatgagacaaatatttaactcaaatgtaggcatttattaatctcaaagagaaaattaactgtccggacaggagaaaaaattaggagacatgaaaaggggggaaaatcaactgatattacttttcatttgcaacattaaatgctagatggaaagaagttttcagaatctcgagaggtaaagaattaacaaccacagaattatcttctcagccaaattattctttaaatttcaggtgattctaacaaaactgaatggatcaagttagggctaaaagtatgccagaagtcttatctagtgtcttggtttgtttgggctgctgtaacaaaaataccttacagtgggtggcttataaacaacaggaatgtattgctcacagttctggaggctgggaagttcacgatcaagtcaccggcagtttcggtgtgtggtgagagcttttgctctctggttcatacatggtgccttcttgctgtgttcttacatggtggaaggagctaactagctcttcagatgtctcttcgtaataccagttatgagggtagggccttcatgacctcccaaaggaggtcctcccaattgcctcccaaaggccctactttctaatactgtcacaatgggcattaggcgtcagtgtatgaatttaagggaacacagacattcagaccatagcaccttgtaaggggatatggaaggagatgaatggtagatactcattagtgcttgacacttagagagttataatttcaaaactacctctttaaggaaaactattaatagtatagaaacaggatttattacttttaaacttgctggcgaaagggtggcaaaatgaaccacaaatacatttcagtgccacaaaattgggtgtggggccaggggagtgatgaaacaatagcccatagaacataaagtggtgaaaataaaatgaaaacaaatttgaatagactaaactctatcctattaaacagctgaaacagataatataaaatagcaacacagtttgcataagatgtacgtagaacaaggacagatgccgacaagagctgcatagtgaccttttggaatgatagcaggaatggcaaagcaatatcaggcaaaatgtgaggtagaaattattaaatgggatagagaaagcagttttatatattcttccaagatgatgtgaaagctgtggtcctttttgtaccatgaaatgtaacatgaaaagagtttagtgtgatgggtaatacatggctttgatgtgagaactaaatgcataaatccctggtactatttactaggcttttaacctggacaagtgacttattctcagtgcctcagtttcccacatgtatcccagaggggaataagtaggctgttgtaagcccgtgtggggattaatggaggtaaaccacttaacagagtaccttgcatgttactcagtaactgacaggccatataatcaaaggatgggaaaggccatgggggaattaaaggcatggttaataagcttggttgtatgcgtatattacgtatctcataccacatcttttttcaaatgccatgagtaagatttacaaaaattaaagaaaatcttcacttctcaaaagtagacataatacagcatgcgttcccgctaaaattcaacgaaagagatactctggagaaatttaacattggaaattaaaaatgtctttccaagtagattttagattaaccaaaactagaattacagattgtgtaggaaagtgaaagacatgctggcagagctgatgtctaaggaaaaattatagctttaaatgtcttaacaaaaagattttaaatctaagtcattgagtatctaaagagcaaagtaaaatatactttgaaaggaagtcatcaaagcacaaattataagtggtcgttatgaacttttttcaagactaaggaaaaaagaaacaaatattaataatgaaagcagatgttcacagccatggtggaatgtatactatttatttgagtatgctcctagagtatctagattcttcagaaggtcctgtgtgtctcttaaaaaatgaaaccataacaatcgcactccctgcataatgaatatgggaggagacttggtaatcaagagagcttatgtaccatctgtcccatgtcagcctggccctctaactggtcactgttgtatatattgaggtcccacataagatttcattatagaaaataagggattactactaaaacgttttttaaattctgctttgagagtcttaaaaagtcattggagatacagagaattcacaaataaaacagttttcggtttcatgagtgagtctacatgtccggaggcaccagatgggtaaaacagcagtgatcttctgcccttgggagggctgtaaccttattccagatatgacaacctatgaactgtctttgcctttcctcactaaagtggggaggcaaaaccccaatggcgaggcagcaggggaagagcactcaacttagaagaaccgggttataggccgggcgcggtggctcacgcctgtaatcccagcactttgggagtctgaagcgggcagatcacttgaggtcaggagttcgaaaccagcctggccaacatggtgaaaccccgtctctactaaaaatacaaaaaaattagccgagtgtggtggtgcaggcctgtaatcccagctgcttgggaggctgaggcacaaagaattgcttgaacccaggagacagaggttggggtgagatgagattgcaccactgcactccaacctgggcaacagagcgagactccatctcaaaaaaacagaagaagaactgggttctagtcctgccttctgccttcgttaccctgggactcctggtgagacactgctatataaagggaaccagccacctgccctcccaacactgtatatctgttgcaaggctcagtcacagaggtgctttgaaatgcagacgttccacatgaatataagttttgggttttaagtttctcttaaaattccctgattggttgaaaaatcacataccaatccatgattgagtgatacagtcctcacataaataaaaagcctgttcctcccactgggaagcatttgagcagaaagtagaatccctaagggaatgagtcctaattgcaaaggtgaggaaggtgctgcaacttgtatgtctgatcaagaatattttgacttagtcgtgattctttttttcccttaggttgatgagaacatgaaggtagcacagaaaagagatgctgtcttgcagggaatgttttatttcaggaaagatatttgcaaaggtattacattatcttagatttctaatgtcagcttatgctgcaacaagctgctaaagctcccctgaccctcttctccggcaggtggcaatgcagtggtggatggttgtggcaaggcccagaacagcacggagctcgctgcagaggagtacaccctcatgagcatagacaccatcatcaatgggaaggtaggagggtggccctgtacagtacccctcactgtgcacatcccccggcagggagttcataaagtgtcctgcttcttgtaggaaggtgtgtttcctggactgatcccaattctgaactcttaccttgaaaacatggaagtggatgtggacaccagatgtagtattctgaactacctaaagctaattaagaagagagcatctggtatgatatctatttttcttaatctcataatatagacagcatggtataatcttagaatgttcaatttcttaaagtagtcttttaaaataatgctgtattcatgcacagtttcacatttttatatttctgcaattgtattcaccttataatctttgacactcataatttagattagtagtgctttttttcttatcagttcataaaataggggtgcatctgaaaatcactggcatcttagatgatgaaatggcatctggattgcttacttatcatttacgtccaactgtgttgatcttacatcatcatgggcccttttatagggctaaggaactctgtaagttaaataagctgaacagttctttagcctgcctttgtacatacagtgaggctcctgagaatcccctttctttgttagttttgaggaggttacatttacaatacagtacagtaaccaagtactgctaacacagtacttggcacaagggagctgtcagctgttaataaagtgacagcaataatggtaatggcatctgtatttaactcaaggcttctgtaaactttctggagtcacaaaggatagccgtagaaccctacctcacccctcaaatggtatactgccaatttcccacttcattcactctacttactgttctttattctctccacctctttgatcaaagatcgctcaaggaccctacagtcctctgaggcagtctcatgacactggcatttgtagtcctagccctctggccaaatgggagggcacatgttcttgtacacatgtgctggctcctgttccttaagagctggcagtgtcagcatatgggtggcatctaacaggtaccatagaaactggatgtatgtgttctcattgcctgcctgcaacctagaattcctgcccaggaggagttcttcaaacgctatgaaagatgttcccaccccctgccatgcagctacactaaaaggacatattgatttctctccagaattgtgtttatgctgaccactaaatatcaacttattaaaaaaaaaacttacgtggttttaatttttttttcgctcccccctcgcccacaggagaactaatgacagttgccagatggatgagggagtttatcgcaaaccatcctgactacaagcaagacagtgtcataactgatgaaatgaattatagccttattttgaagtgtaaccaaattgcaaatgaattatgtgaatgcccagagttacttggatcagcatttaggaaagtaaaatatagtggaagtaaaactgactcatccaactagacattctacagaaagaaaaatgcattattgacgaactggctacagtaccatgcctctcagccagcccgtgtgtataatatgaagaccaaatgatagaactgtactgttttctgggccagtgagccagaaattgattaaggctttctttggtaggtaaatctagagtttatacagtgtacatgtacatagtaaagtatttttgattaacaatgtattttaataacatatctaaagtcatcatgaactggcttgtacatttttaaattcttactctggagcaacctactgtctaagcagttttgtaaatgtactggtaattgtacaatacttgcattccagagttaaaatgtttactgtaaatttttgttcttttaaagactacctgggacctgatttattgaaatttttctctttaaaaacattttctctcgttaattttcctttgtcatttcctttgttgtctacattaaatcacttgaatccattgaaagtgcttcaagggtaatcttgggtttctagcaccttatctatgatgtttcttttgcaattggaataatcacttggtcaccttgccccaagctttcccctctgaataaatacccattgaactctgatggctgttatcaaaggaacttttctttgtttaaatttgctgatgcaggaattaagtttaaacacaactctatagaaagaaaggagattattacccagaattcacatgtagtgattattaaggacaatttttttttttaactaaaaaagttggcggcaggggtggggggtggcaatcatttttcttcctatacatacaaaggatattgtcaaaaatggcgttcttctcttgtggcctgttattctgattgctgctgtatacagttttgtcactctttagtttttagttaagcatactgatagactttcctctaaaagccattcactccagattttacctggggaatattctacatactgcttactttctctataaaactcatcaataaatcatgaaaggcactgagttttgtaaatcaggaccctaaatgtttaattgtaaataagtttcagataattattatagctttgcgttgaagtttgttgttttttttctcaactagttaagtcaactgcttctgaaataactctgtattgtagattatgcagatctttacaggcataaatatttaaactgtaatatgctaacttgaagagattgcaataaagctgcttcagctaaccctgtttatgtttaaatactagggtttgttctatattttatacatgcattttggatgattaaagaatgcctggttttcgtttgcaatttgcttgtgtaaatcaggttgtaaaaaggcagataaattgaaatgtttgtggtatgaggaaataaaagaatggaattagctttcattcagaaa

SEQ ID NO: 468 - DNA, 197 bp, Homo sapiens
tgaggcagtctcatgacactggcatttgtagtcctagccctctggccaaatgggagggcacatgttcttgtacacatgtgctggctcctgttccttaagagctggcagtgtcagcatatgggtggcatctaacaggtaccgatagaaactggatgtatgtgttctcattgcctgccctgcaacctagactccctgcc

SEQ ID NO: 469 - DNA, 8045 bp, Homo sapiens
taaaaaagtccggttggtcctgtctggggagaaagttcttgaaactctgcaagagaagggggaaaggacaaacccaaagtaagctctcatgtgctgatttagtgtttctgaaactgctaaaacttctagaatatagagttttttctcaattattggaggcaggatagcctaacagttaagagtacaggctctggtttcaggttgccatagtttcaaatcatggttcctttactcaatagctgaataaccttgggcaagttacttaacttttctgtgcctcagttctctcatctgtaaagtaaagatcatagcaatacctacctaaggtgttggaattaaatacattaatatatgaagcactttgtacagtaaactaaatataaagcctgttttttattaaaacatttttgggaaaaaatgtattgcagaagcgtataactgggatcacaaaccatgatgcaagatataagttgcagatgggctttgtttggctttgtttggctggcatgatttttttttgagacggagtctcactctgtcgtccgggctggagtgcagtggcacgatctcagctcactgcaagctccacctcctggcttcacgccattctcctgcctcaccctcccgagtagctgggactacaggcgcccgccaccacgcctggctaattttttgtatttttagtagagacgggggtttcaccatgttagccaggatggtctccatttcctgacctcatgatctgcccgcctcagcctcccaaagtgctgggattacaagcatgagccaccgcacccggcctggtgtgtttttaaggtattcctacatttaagtagacagagacggcgaggggaggggaatatatactcctctgctcattttccactcattcgttttggggaagctgcatttgagtttggagggcagcactgaattgaaagaacccttaaggcctcatctccttctctgcagagtaggttagtttgtcctggacagtgagtgctctgtgtgcattttcagttacttataaagattttgggttgggcatggtggctcatgcctgtaatcccagcactttgggaggccgaggcaggcagatcacttaaggccaggagttcaagaccagcctggctaacacggtgaaaccccatctctactaaaaatacaaaaattagccaggtgtggtagggcacacctgtgatcccagctacacaggaggctgaggcacaagaatcacttggacctgggaggcagaggttgcagtaagccaagatcgtgccattgcactccagcctgggtgacagagcgagactctgtctcaaaagaaaaaaaacattttggacccaatacttgttgacccttatgtagttgaatagctatggaaaagtaataatcactgagaactgtgaaggacttcttagcttcatttatacctaatggtttctacacttttaaagcaactttaaaaacttaaaaattgagcagactatagcaaaagaataagatggaactaagttatttctcctccgtagccatcctaccctttggagaccagagtatgggagttacatgattgaagggacaccaggacagccctacggaggaacaatgtccgagttcaatacagttgaggccaacatgcgaaaacgccggaaggaggctacttctatattagaagaaaatcaggctctttgcacaataacttcatttcccaggttagttcctatattaacatgccccagcagatctctcagagatacaggtaatgaaaagagcaagtcacgacccgggcattccaccttacaatcctcatacgttacagatggtttatcttttatagactgcacttgatagactctgtaacagtagagctgcagacacagttgcatgccagcttctgtcagctgtggtggctgcaccgtggtgagtgcactcagtgggggctcagtgggaaagaccaggatactgtgatgacagaccagcagtgtggccgtgtctgccgcaggcgagggtggagggagcagcacgcctgccacacagttctgaccctgtaagcagtagccaaagcttctggaatgctgtcccctggtgactgtgacagttgcgccctcatgcactttcaaaaagcagcatttacctgctagcatatggtggcatcagtggcagatcagaggatctgcagtgctcccaaagcactatcgataccgatgctctatgaacaacgtgagtcattaggtccttgcatattgttctgaaaagaagatttagggtttgtcatcaaatctagttatgaccaaaagtacataaaagtaaatagtgaaattatgttcttcgcttagaatgaggtacatgaatatcatatgtattatacatagaacctctatgtaaaaatacatttctgccaaaacatgaatgtgatttatctatgctagatgtctgtcagatggtgacagtatacttagctcctcaaagttcaaaggagctctgggggttggtatcaatggtggagaacactttgaactatttttataccttttctctgatacgtgtccgtcagccattcagggtcatatcattggcctcagaggggcatttaaatgggaattctatttttttttttatatctctactgtaacatctaaatagttgaaaacttatttaagccagccatctaacatttatagaagcatctctatttctgtgataccttcattctgtatgtacaggtcacttctctctccacccccagaaggaaaaacccagctgggtgagggtggacagatttgttttgattagagtgggcacatttcttcgacctaatgtttgaaagaggaggtgaaaaatcattggccctgccattcactcagacacttgagtgcctgctgcaggcagaatgggcatgctctcatgagtgaagacggacagctctgtctctgtggagctggggggttgaagaacaatcaaatacccatagattcataagcgtcaaagtggggctgtgctagcaggaggagatggggagcaaagagtacaacctaggtatccagtggactctggtgggtggagggggagggggtgggatgtccaaggttccaggaggagtgaaataggaatggggagcggaggacagtcttagggagggggagcagtgtgtgtagaagtcctaggatgaaccaaacaagcggggacttcctgggaactagaagaaagcaagctggccagtgtgactaggaggctgaggaggaagtgcaggtatgggggaaagggaagctggcaggtaattggcaggccaggtcaggttaaccataaattttagttgttctcctaaaagcagttgaaggccttggaaaggttgggttgggcagatggcattccctttttgctttgcagccctcacttgggctgtagtgtgagagtagctgtggagctggtgccagggcttactaagaggtgagtgagggagctccctgaggggagacaagggctgcctggatgcccgtgggtgctggtgataggaaaagtgggtggtttaaaagatgacagagtcagtgaactgctggggagagaagaacatcaaggcttttgctataggtcattgtcctgaaaaccttaagagtactagagtagaggccaaggagtaggttacagatgttaaatgacaacttctagtgaactggaaatttaataccttatatgttcatttttttccccttaacattaagagggttgtacatttcacttagcaaattaagaaagtgggaggggatttgtaacacaaaccagaactgttttatatattaaagctgaagaatatataggattgatgggcagtggtgtttccttctgggccagaaaataaagttttgggttaagcctaatgtgccctttaccttgagaatggttccatatgggatagttgcctttttaaaaaagatttagtgtctgggcatggtgtcttacacctgtaatcccagcactttgggaggccgaggcaggcggatcacctgaagtcaggagttcgagaccagcctggccaacatggtgaaaccccgtctttacaaaaaatacaaaaattagccaggtatggtggcatgcgcctgtaatcccagctactccggaggctgaggcaggagaaccgcttgaacctgggaggtggaggttgcagtgagctgagattgtgccgctctgctccagcctgggtgacaaagcaagcctccgtctcaaaataaataaataaataaaaataaaaagattcagcatcttaagtcattgtgaagggaaagttgagacagaggaataagctttattctaaaaacctgtaatttagaaaaaattatatgtataattttttataccctgtccatataggaaggtattttgggacttgaaacaataattattagttatttagtggttagaagcctccctatacatccacaataaatgataaagttttgttgtagtataggatcaagagagaaaggagtgctctggttcttaagtgtaaacagggtgactttataaagatgcaaagatttatagtgtggaactctagtccaaaacagtaatcatgtgactatttaaaattaaaattatataaaatgaaaattgtagttcctgatgtgactgaggaactagcctcatttcaagggctcagtagccacgtggttagtgactaccacatcggtttggatagtggagatattaaacatttccatcactccagaaagttctgtgggacagcactgctctagaatgaagcagtgccgtaggtgtccgaagatgcaagttctgattctaccttctcccttccacacaaacacattctcattctctcttcatccaatctgattctggtgagcaaggaatcccctcagatttaagtttattactctcccaaaggactattcctaaggttgtaggctcatagtaaataatgcacatagcttcaagaattctcaagaacccttgtagctgggaactgttttctagataagatcactaccttcaattgtttacaaggtggatatgggcaggcaacagatactttattttatattaagaaaaggtaggggttaaaaataaggcattgatggccaggtgaggtggcacgtgcttgtaatcccagtactttaggaggctgaggcagaaggattactggagcctaggagttaaagaccattctgggtagcatagtgagacctcgtccctggaaaaaaaaaaaaaaaaaaaaaaaaacttggtacagtgactcatgcctgtaatcccagctattcaggagcctgaggcaggaggatgacttgagcccaggagttcaaggctgcactgagctatgattgcaccactgcactccagcctgggagacagagcaagaccctttctcagaaaaaaaaaaaaaaaaaattttttttttaaaagatatgagctagtcttgatcctcaagccaaaagtttcttcccactaatttaaaactcctcccttgtttggctttcgcttagtctttgtcctccctcacagcacatgtaatattgacctcaaattcctaacttggaaaaactggggccatcactaaaagtgatgtagaatttgagctttacacttaggaataaatatggagcttcatttttctgtgttgaaattagagctccttaagtcaagtaagagaataggattgggtttcagacttcagagggtgatctcaggggtagatggggacacctgcagagacactccctaatcttgagggactcatgaggtgacctatagaggcaaaaaacaggctccttccagattcagagcctaccaggaagtgggaggcagtggtgccatgcagcaggtccaaagataatctgagagtttagagatggaaaaggaagacacctcataggccatgtaggggacacctgtcacccatgacagctgatgtgaccaagggaaatgacttctgtgctatcagtccttcctattagatgaagagatggagaggacccgagtaagtgctgtgtggtttgtgagtgagtggagacttggataaagttagtagtgggctggaattaaaagaagatccttgtgagcaagaagtgtggggagtggttgtaaaggggcacagtatttacacaacatctgttttgtaaacacaaagccctctgaaaaggggatactagaaatgaggtgtctttggcaggtgcagtgatggcaagactgcacacaattaattcttgaaaacaaatcccatctatttagttcttcaatttgttgtagattaggctgtcctgggttcacactgcccgaggtcaaacccaacccagtggaaggaggagcttccaagtccctcttctttccagatgaagcaataaacaagcaccctcgcttcaggtgagtatggctttgtgttgaaatgcagatgcccttcactagacccctgacttctgagagtatagtatttctgtctagaaatcctttttgagcattaactgagttttggctctcttcctaagtaaccagagaagatagcagatgtgcacctgttcacatcttcagtacccccaggcttcttggttgttgatgcatgcaccaggcttgatttgtcaattctccaagtcgtcacaaagttattcgctgagccactgcgaataactcttttaatagggagattattttcagtcctaggtctgtaaatgcctactgggatttttttttctcttagttatttctccttttttgtcctctctaaccatcagtatctgtgatttgcccatcttactctatataacttataaaataggtgcagtacctgatatatataataggcactctcttccattaacttcaagttctgttggtttgttgttcaattctgaggttttaagttgctttaaggctctcactagtctgatcttagctttgtacaatgcatgctcatctgtcatcctgagcctaggctcctgatccagagtgggaacatggagacttctcagcgttcattcctttaacaggccctcacgtttgctatgtgcagagccttttggggaagacagatatttgtagacgtagtttctaacttcatatgttgtcatgtgtttaaaggaaaataaaaataattcagctgctcaagaagagatagattatgacagatgtcaaaagatgcaccagaaatccttcttggagaaagtaaggtgcttctgactgagggaatcaaagcaggcttcacggaagaggtggcatttaagctgagtctatagcagcactgcccatagaaacatgtaattgtaaatgttctcatagccacattaaagtaaaaaccagatgaacataattttatattttgtttaacccaaaacgtccaaaaatgttatcatttgatccatgtaatcctttactcacaagtaattttacattttttttgtacggagtcttcaaaatctggtgtatattttactctcacagcatgtgcatgttttcattaggacaagccatatttcaagtactcagtggccactgtgtgcctggtagcttctggactaaacaagcatgagtctggaggataattattaatcctgcagagatgagggagggaggagcaaggtattggggctccagagatgcctgggcaaagtgggtactaaagtttgaccaaagtctttggagttaatttgggacatgttgcaaacagtgaaagcagaccatggcagactttgaacacctgaattgatttggtaagttacagggagccttgggagcaggggttgagcaggagacagaacggcattctcgagcaggagccaaagaattgatactaatgcaaaatctttaatcacaaagttcccttgtagtgtcttgacaccacagatacattttctgttgagttgtcttagagaactaatttgaggtatgatttcattccacttacttgtatgtaatcaaattcttcttttacacgatgactcttaggtgaccattttatgacgtttggttgtctgttttagtaccttaacaagaaaatatccgacataggagaggagaaaaggttgtcatcaatgtaccaa

SEQ ID NO: 470 - DNA, 8054 bp, Homo sapiens
taaaaaagtccggttggtcctgtctggggagaaagttcttgaaactctgcaagagaagggggaaaggacaaacccaaagtaagctctcatgtgctgatttagtgtttctgaaactgctaaaacttctagaatatagagttttttctcaattattggaggcaggatagcctaacagttaagagtacaggctctggtttcaggttgccatagtttcaaatcatggttcctttactcaatagctgaataaccttgggcaagttacttaacttttctgtgcctcagttctctcatctgtaaagtaaagatcatagcaatacctacctaaggtgttggaattaaatacattaatatatgaagcactttgtacagtaaactaaatataaagcctgttttttattaaaacatttttgggaaaaaatgtattgcagaagcgtataactgggatcacaaaccatgatgcaagatataagttgcagatgggctttgtttggctttgtttggctggcatgatttttttttgagacggagtctcactctgtcgtccgggctggagtgcagtggcacgatctcagctcactgcaagctccacctcctggcttcacgccattctcctgcctcaccctcccgagtagctgggactacaggcgcccgccaccacgcctggctaattttttgtatttttagtagagacgggggtttcaccgtgttagccaggatggtctccatttcctgacctcatgatctgcccgcctcagcctcccaaagtgctgggattacaagcatgagccaccgcacccggcctggtgtgtttttaaggtattcctacatttaagtagacagagacggggaggggaggggaatatatactcctctgctcattttccactcattcgttttggggaagctgcatttgagtttggagggcagcactgaattgaaagaacccttaaggcctcatctccttctctgcagagtaggttagtttgtcctggacagtgagtgctctgtgtgcattttcagttacttataaagattttgggttgggcatggtggctcatgcctgtaatcccagcactttgggaggccgaggcaggcagatcacttaaggccaggagttcaagaccagcctggctaacacggtgaaaccccatctctactaaaaatacaaaaattagccaggtgtggtagggcacacctgtgatcccagctacacaggaggctgaggcacaagaatcacttggacctgggaggcagaggttgcagtaagccaagatcgtgccattgcactccagcctgggtgacagagcgagactctgtctcaaaagaaaaaaaacattttggacccaatacttgttgacccttatgtagttgaatagctatggaaaagtaataatcactgagaactgtgaaggacttcttagcttcatttatacctaatggtttctacacttttaaagcaactttaaaaacttaaaaattgagcagactatagcaaaagaataagatggaactaagttatttctcctccgtagccatcctaccctttggagaccagagtatgggagttacatgattgaagggacaccaggacagccctacggaggaacaatgtccgagttcaatacagttgaggccaacatgcgaaaacgccggaaggaggctacttctatattagaagaaaatcaggctctttgcacaataacttcatttcccaggttagttcctatattaacatgccccagcagatctctcagagatacaggtaatgaaaagagcaagtcacgacccgggcattccaccttacaatcctcatacgttacagatggtttatcttttatagactgcacttgatagactctgtaacagtagagctgcagacacagttgcatgccagcttctgtcagctgtggtggctgcaccgtggtgagtgcactcagtgggggctcagtgggaaagaccaggatactgtgatgacagaccagcagtgtggccgtgtctgccgcaggcgagggtggagggagcagcacgcctgccacacagttctgaccctgtaagcagtagccaaagcttctggaatgctgtcccctggtgactgtgacagttgcgccctcatgcactttcaaaaagcagcatttacctgctagcatatggtggcatcagtggcagatcagaggatctgcagtgctcccaaagcactatcgataccgatgctctatgaacaacgtgagtcattaggtccttgcatattgttctgaaaagaagatttagggtttgtcatcaaatctagttatgaccaaaagtacataaaagtaaatagtgaaattatgttcttcgcttagaatgaggtacatgaatatcatatgtattatacatagaacctctatgtaaaaatacatttctgccaaaacatgaatgtgatttatctatgctagatgtctgtcagatggtgacagtatacttagctcctcaaagttcaaaggagctctgggggttggtatcaatggtggagaacactttgaactatttttataccttttctctgatacgtgtccgtcagccattcagggtcatatcattggcctcagaggggcatttaaatgggaattctatttttttttttatatctctactgtaacatctaaatagttgaaaacttatttaagccagccatctaacatttatagaagcatctctatttctgtgataccttcattctgtatgtacaggtcacttctctctccacccccagaaggaaaaacccagctgggtgagggtggacagatttgttttgattagagtgggcacatttcttcgacctaatgtttgaaagaggaggtgaaaaatcattggccctgccattcactcagacacttgagtgcctgctgcaggcagaatgggcatgctctcatgagtgaagacggacagctctgtctctgtggagctggggggttgaagaacaatcaaatacccatagattcataagcgtcaaagtggggctgtgctagcaggaggagatggggagcaaagagtacaacctaggtatccagtggactctggtgggtggagggggagggggtgggatgtccaaggttccaggaggagtgaaataggaatgaggagcggaggacagtcttagggagggggagcagtgtgtgtagaagtcctaggatgaaccaaacaagcggggacttcctgggaactagaagaaagcaagctggccagtgtgactaggaggctgaggaggaagtgcaggtatggggtaaagggaagctggcaggtaattggcaggccaggtcaggttaaccataaattttagttgttctcctaaaagcagttgaaggccttggaaaggttgggttgggcagatggcatcccctttttgctttgcagccctcacttgggctgtagtgtgagagtagctgtggagctggtgccagggcttactaggaggtgagtgagggagctccctgaggggagacaagggctgcctggatgcccgtgggtgctggtgataggaaaagtgggtggtttaaaagatgacagagtcagtgaactgctggggagagaagacacatcaaggcttttgctataggtcattgtcctgaaaaccttaagagtactagagtagaggccaaggagtaggttacagatgttaaatgacaacttctagtgaactggaaaatttaataccttatatgttcatttttttccccttaacattaagagggttgtacatttcacttagcaaattaagaaagtgggaggggatttgtaacacaaaccagaactgttttatatattaaagctgaagaatatataggattgatgggcagtggtgtttccttctgggccagaaaataaagttttgggttaagcctaatgtgccctttaccttgagaatggttccatatgggatagttgcctttttaaaaaagatttagtgtctgggcatggtgtcttacacctgtaatcccagcactttgggaggccgaggcaggcggatcacctgaagtcaggagttcgagaccagcctggccaacatggtgaaaccccgtctttacaaaaaatacaaaaattagccaggtatggtggcatgcgcctgtaatcccagctactccggaggctgaggcaggagaaccgcttgaacctgggaggtggaggttgcagtgagctgagattgtgccgctctgctccagcctgggtgacaaagcaagcctccgtctcaaaataaataaataaataaaaataaaaagattcagcatcttaagtcattgtgaagggaaagttgagacagaggaataagctttattctaaaaacctgtaatttagaaaaaattatatgtataattttttataccctgtccatataggaaggtattttgggacttgaaacaataattattagttatttagtggttagaagcctccctatacatccacaataaatgataaagttttgttgtagtataggatcaagagagaaaggagtgctctggttcttaagtgtaaacagggtgactttataaagatgcaaagatttatagtgtggaactctagtccaaaacagtaatcatgtgactatttaaaattaaaattatataaaatgaaaattgtagttcctgatgtgactgaggaactagcctcatttcaagggctcagtagccacgtggttagtgactaccacatcggtttggatagtggagatattaaacatttccatcactccagaaagttctgtgggacagcactgctctagaatgaagcagtgccgtaggtgtccgaagatgcaagttctgattctaccttctcccttccacacaaacacattctcattctctcttcatccaatctgattctggtgagcaaggaatcccctcagatttaagtttattactctcccaaaggactattcctaaggttctaggctcatagtaaataatgcacatagcttcaagaattctcaagaacccttgtagctgggaactgttttctagataagatcactaccttcaattgtttacaaggtggatttgggcaggcaacagatactttattttatattaagaaaaggtaggggttaaaaataaggcattgatggccaggtgaggtggcacgtgcttgtaatcccagtactttaggaggctgaggcagaaggattactggagcctaggagttaaagaccattctgggtagcatagtgagacctcgtccctggaaaaaaaaaaaaaaaaaaaaaaaaaaaacttggtacagtgactcatgcctgtaatcccagctactcaggagcctgaggcaggaggatgacttgagcccaggagttcaaggctgcactgagctatgattgcaccactgcactccagcctgggagacagagcaagaccctttctcagaaaaaaaaaaaaaaaaaaaaaaatttttttttaaaagatatgagctagtcttgatcctcaagccaaaagtttcttcccactaatttaaaactcctcccttgtttggctttcgcttagtctttgtcctccctcacagcacatgtaatattgacctcaaattcctaacttggaaaaactggggccatcactaaaagtgatgtagaatttgagctttacacttaggaataaatatggagcttcatttttctgtgttgaaattagagctccttaagtcaagtaagagaataggattgggtttcagacttcagagggtgatctcaggggtagatggggacacctgcagagacactccctaatcttgagggactcatgaggtgacctatagaggcaaaaaacaggctccttccagattcagagcctaccaggaagtgggaggcagtggtgccatgcagcaggtccaaagataatctgagagtttagagatggaaaaggaagacacctcataggccatgtaggggacacctgtcacccatgacagctgatgtgaccaagggaaatgacttctgtgctatcagtccttcctattagatgaagagatggagaggacccgagtaagtgctgtgtggtttgtgagtgagtggagacttggataaagttagtagtgggctggaattaaaagaagatccttgtgagcaagaagtgtggggagtggttgtaaaggggcacagtatttacacaacatctgttttgtaaacacaaagccctctgaaaaggggatactagaaatgaggtgtctttggcaggtgcagtgatggcaagactgcacacaattaattcttgaaaacaaatcccatctatttagttcttcaatttgttgtagattaggctgtcctgggttcacactgcccgaggtcaaacccaacccagtggaaggaggagcttccaagtccctcttctttccagatgaagcaataaacaagcaccctcgcttcaggtgagtatggctttgtgttgaaatgcagatgcccttcactagacccctgacttctgagagtatagtatttctgtctagaaatcctttttgagcattaactgagttttggctctcttcctaagtaaccagagaagatagcagatgtgcacctgttcacatcttcagtacccccaggcttcttggttgttgatgcgtgcaccaggcttgatttgtcaattctccaagtcgtcacaaagttattcgctgagccactgcgaataactcttttaatagggagattattttcagtcctaggtctgtaaatgcctactgggattttttttttctcttagttatttctccttttttgtcctctctaaccatcagtatctgtgatttgcccatcttactctatataacttataaaataggtgcagtacctgatatatataataggcactctcttccattaacttcaagttctgttggtttgttgttcaattctgaggttttaagttgctttaaggctctcactagcctgatcttagctttgtacaatgcatgctcatctgtcatcctgagcctaggctcctgatccagagtgggaacatggagacttctcagcgttcattcctttaacaggccctcacgtttgctatgtgcagagccttttggggaagacagatatttgtagacgtagtttctaacttcatatgttgtcatgtgtttaaaggaaaataaaaataattcagctgctcaagaagagatagattatgacagatgtcaaaagatgcaccagaaatccttcttggagaaagtaaggtgcttctgactgagggaatcaaagcaggcttcacggaagaggtggcatttaagctgagtctatagcagcactgcccatagaaacatgtaattgtaaatgttctcatagccacattaaagtaaaaaccagatgaacataattttatattttgtttaacccaaaacgtccaaaaatgttatcatttgatccatgtaatcctttactcacaagtaattttacattttttttgtacggagtcttcaaaatctggtgtatattttactctcacagcatgtgcatgttttcattaggacaagccatatttcaagtactcagtggccactgtgtgcctggtagcttctggactaaacaagcatgagtctggaggataattattaatcctgcagagatgagggagggaggagcaaggtattggggctccagagatgcctgggcaaagtgggtactaaagtttgaccaaagtctttggagttaatttgggacatgttgcaaacagtgaaagcagaccatggcagactttgaacacctgaattgatttggtaagttacagggagccttgggagcaggggttgagcaggagacagaacggcattctcgagcaggagccaaagaattgatactaatgcaaaatctttaatcacaaagttcccttgtagtgtcttgacaccacagatacattttctgttgagttgtcttagataactaatttgaggtatgatttcattccacttacttgtatgtaatcaaattcttcttttacacgatgactcttaggtgaccaatttatgacgtttggttgtctgttttagtaccttaacaagaaatatccgacataggagaggagaaaaggttgtcatcaatgtaccaa

SEQ ID NO: 471 - DNA, 9289 bp, Homo sapiens
  SITE (4052): n equals a,t,g, or c
ctaaaactcacaagatgtctttactgattttatacactgcctggcacatcaaatgaacttaataaatattttgagagtgaattaatatatacagtaggaaagacacatacacacaaggcaggctgcagtaagtgctgtaaaagagacaatgagacagtagaggaattctgcaacagaagctgtggtgagaattaatctatgatgtgttagactctccagctatatatatgcctggaccgatgtcaccacttatctgcagttctcctgtgatgtttccagggtacatgattaagactcatttaacattccaggaatattctgctgatgaataatcactgagctggagtcaagagaagaagctttagatactaaccgaccctgtgatcatgagcaagtcacttcccttctctgtgcctcaatttcctcacttataaagtgaaaacaaagggccaagtgagggtggaaggatccccctaccctggagatctgtgattctataacatatgggcaggaaagacttgataacacactcagggtctatgtgggctgttctgaaggcatctggccacccatcacctttttatggccaagtactaggttggttctgtggttccaattacaggaacagaacaggttctattttcccccaattacaggaaattggccttgcctctctgggtgcacctgatgaatacattgaaaagctcgccacagtaagtcccttctctccctgggtggatggtggagtgctataggctatggccctcaggtctttgaaactttcctactcccctggaagccaggttatctggggaaaaaaatcagaatgtggtgggttacatttgcacaagtgaaacttcacattttgatagatttctccttaataatttgattttgaaatcagctacctacagatgtttacatctcttaaattttaagcagtatcttgaacccaccaacaggctataatagtagcccttgaaaacccttggcataaagtgtgtgtatgaagtaatctggatccagagctttgaacatggaatgtttacatctctacttttcacaccagagcatacattaggatcttttctttctcagacatgagggagaaatgggggtgggctttccccttcttgctgaacactttcctctcctgagtatatctgatgacacttgtccactggggctatagaagcaattctacatagcaggtgatttccttccttcatactcgtttctaattttagtacatcccaccccagccactagccacattgcctgtcctggaagttgaaaaataaacatttataattgaattgtggactgccaatgagtgcaaatctattattaagatatatcagtttagaagcttatgaactcgttccatcaaaaggctaaaaactcccagaaggttatcttctcactgacagctgctttcaggtgctggacaagtggctttttcttcctcatctctaacaatgggatgcaatagctcatatcttgcccatctcaaaggcaactaaaaatttaactatttaaattgaattatttaaatttttgtgaacatgggtttttaaatgccagaggctacagagatacaaggagcggctttcaaagaagttacagagctagatagaatttctcatctctacaaagaaaataaacttggaagtcaaagcatcatgttatctgccataacaatattaaaatgacttatcaccaatgcgacttttctaaaaaattgttactgattgaaaaaatgttactgattggttgaggaacagtcctggattcttgctgcccttaatttgctgtgtaactacatgcatgttgccttaccttcctgggctgaagactcctcacctgtatgtgaggaggtcagactgactgagctctgacagccctcccaggtttaacattttctagtccaataaacagatgtaactaataacctacccctaattctccaaaactgtgactgtctccagcagctaactgagctctgggttcctcttagccccagaaccccaatattctttttttcaggccaactctctaggacatattgaactgtcagttattgaaagaaaagtacttggttatttgcataaatgcagtagttgacttcagaaacatccccaagttttagcatggatgatgggacattctcctcactgattctatcactacccagtctgctacctcccactgttgtgcctaatgagctctgccagcttcagagcatctgaggaacatctcagtctagttgacaccacagagaaaaaaacaaaagagatggaggagttcctgtcatatggagaacatattgttgggagcctccttttggggcttcttagtacctcctgatattttccatcatgctttacattcagccagcactcaacaggtgactagatagagtgagacacaggacacagagacgtgatcacaggtcatgctgattcagagaacaaacctgcacaggcttctacctgggcaatcctgtccatggcactggggcagttgctgccttctccttctttgaggtgtgtactagtcaaagatctccagagagaaagaaccagtgagatatatatagagagagaaagagagagagggaaatctgagaggggacttattaggggaattggcttacacagttatcaaggctgagaggtcccacgatatgctgcctgcaagctggagaacctgaaaagtcagtggcgtagattagtcaaagttcaaaagcctcagaaccatggaagttgatggtatagctctcagtctgagaccaaaggcctgagaacccctgggtggtggttgggtgcgagtcccagaatccaaaggccagaaagcctggagttctgatgtctaagggtaggagaaacagggtgtcctggttccaagagagatagaatacgtatgtggctttcctctgcctttttcttccatctgggattccagcccattgggtggttcccgcccacaatgaggaaagatcttccccactcagtccactgactcacatgccaatcccctccagaaacaccctcatagacatagacacaccccaaaataatgctttactatctattcaggtatcccttcatccagtcaaggtgacacataaaattaaccatcatagagtgtgctctcagattgactttccattccagatttactggtttactgtggagtttgggctctgcaaacaaggagactccataaaggcatatggtgctgggctcctgtcatcctttggtgaattacaggtatgaccttcacaggaaccaaggatagatttaaaagtggtgggtacagaaaaccattattgtgctttcaatattgttgaaaccctatttgtatccgttttgatatgcaacctgggaactcattctccagtgattggtaccttagcagctatgatttgatgatggctgtgggttttacagatagaaatggaattgcaagtacacatatctctggggagaaggggcctcctgattccaaggctgacctatgcatgcagccttgtgagtatgcaaacacatgccagaaagtgtggttggctcccacgtcatctattgaccaccttacttgaaagtaattggaatgaattactcctttctcccttggctgtaggttttagatgagctatgaagggtagaacctagtatgtgcaaagtaatttggctcacagcatttgggctgtgatgtagaaggaatcggggtgagatgagagaaggggcacaaatggcctatgggatgcagcagggaatactgatcctgatttaacagtgataataacttttcacttggggcctacagtactgcttatcagagaagccaaagcttctccccctggagctggagaagacagccatccaaaattacactgtcacggagttccagcccctctattacgtggcagagagttttaatgatgccaaggagaaagtaaggtgaggtggtgacaaaggtgagccactagctctgggggcctcctgactggtgccactcatctgtgggtggttggccaggagagtggactncaatgtctacagcaactttgtaccatagacagtttctctcccatgttctccaccctccttttcttccgttctctgttggaaaggtgggcatgctgacctttgcacacacccctgccacctggtccctgttcaacgcaaccaccaagtcaagacactgaaccctcctgcatacagagtggccacagaagtctccccacaaaatcaaagaagtcttataacctaggaagtcctttcttcactatcttctcccaaacacctacaaaatttgcttcctcctttgtgtctttacccaaatttaatctctatatgtctttctctaaccaacttatttctactcatccctgccaccagtgcgtctgtaatacttattaacttgtaatatattacataaggtaagctccatgagggtagaaattttgttctttctattttctgtttttcctccagcccctggaacaatacctgacacagagtaagcactcaataaataattggtgaaggcattaatcccagaggcagttcagcaagaggctgatggagtggttctgggactctgagactgttggccctctgagtgcacagttcctgcacccaagcaggagacagactgggcagagggtccacctggacatgaatatcctaatactcactgtatgttaccacttaaaaaaatcttatcagtgatggatgacaggcatggaacatacaggcctttgggagtctatgacactgggtatgttagctttcaaccctatctatggcctctgagaggtcagaggaatggaggggagtggtgatagaataaatgacttctcaaagaaatccgcacttttgaaaagagagacatgagggaggaaagagagacataagggagaaagtcaaagacaaatgaacatacatcttagtccttcctttctaaatccaaattccatcccccccagacccctcacaaagaaaggtaaaaattatccttttgccagctcattcacttaccttacatttgcaaggtaagattgtgggacaagacaggtccagctaacatttgtttgagaaccctttggaataaagagacttcaaagaggactaactttctttcttttaaaatggatattccttaatttatgtctactatctttagataattaaaggtaaaatgctggcccacaaatccacttggtgtggcctaaaatgactatttctccagctctgtccagagctctcaagtccttctggctctgcttttttaattctctcctaaactgggagcctagcctccttccagcatcatccccctctccctccaaggcccaaggtttggacccaggcattggagcttagaggcagtgctgatgagcaccctgtcatgccaagatcacatttggatgggccctcctggagacaactctctaaccagcaagtgatcagtcccagaccagcagggaagagcttgccaggaaacaggcctgtcagtaccgaggcctcaagggaaacaaccatgaaaaccccattctgctgagaagtggctcagagaatcaaagagaatgctaaagaacagagttcaaaacaaggaatctgcacatccctttggattccctcaaagcatctcagccaagagaaaccaattctaaccacttggagttttaagattcaagttgtaggcagagatgtgattggctgagcatggttcacatgctacctcctttccagaggagggctggcaccgaatactgacttctggactgatacacacctagtagggtaggggtaaatcacccaaagcaaaaatgagctgctttatgggaagaaggaggaagaggtgcagagcaggcaaaatcacagatgtgtaacatgtggctcatgccaccagctgggttgagacagctcctttcagagaagaaggggtggaaatatatacttggccatttgttcttcatgaaagatagcaactaacactcatagggcacttacaccatagtataacagcatttgctgcaaccccctgaggcaggtaccactaatgccccaattttacagaggaaattggggtacagaagagtggtcccctgtgcccatggtcacaagggccataatagacagaggcagggtttcagcccaggcagcttgacttggaacttggggagccactcttgccaaacttggaggtccctactgtctcccgtaacattgtattttcagtacagcagcttataggttcaccagaggccaacttagaaatctgtgattactttgcaacatcttgttaatggtattgcatgatgtccctcatagaggccctcatggtggatttctcccagatccaggagtaaggcactgggaaggcaggaaagcaaagggtccaggccagtgtcagactgcctgggttccttcccagctgcataacttactgacagtatggccttagtagtcacgcagccttcccaagcctgtttcctcatccataaaatgggtatagcaatggtgcctttctcctaaggtttttgtgaaggttaaataaggaaggatatttgtaaagagcattggacagttagaacttaacatagttcttggaacatagaaggtactccatcaatgttaaatttcattattaacatagtgctttcttcaccacttgagagctatttccctctgcattgattgtcaaccatttcagagcttttttccctctatatagcattctttagctagattttacttactcttgattttatttaatgataggagtttgtggctttattgtattcagtagtttcattgtaagctatctctgtcttcttggagccaggggactaaataaacatgtgtatatatgtgtttgtacatacacatacacacatacagaggcttcccaagaagactcattaaaactccattccccccgcctcagccctggctgttgaagaccctgctctagggaggtgtccgtgttcctaaaaaagaagtaaaatgccactgagaactctcttaagactacctttctccaaatggtgcccttcactcaagcctgtggttttggtcttaggaactttgctgccacaatacctcggcccttctcagttcgctacgacccatacacccaaaggattgaggtcttggacaatacccagcagcttaagattttggctgattccattaacagtaagtaatttacaccttacgaggccactcggtttctcagtaatcgaagactgtctttccctaccatcgccataggaaaaataataaatttattgaaatatttaattaaggagaaaagcacctccatgtaagccatgggttcattgatggagaagaacttgacaaaaaggtcagaattacccttgtgtcctttttcctttgaccttcctagattccactccacctcctaccatcattccacctttccacacttggtctgtcactgccatgttcctttttctccctcgcctctccatcccttctacgctaagtgtccagttgttatcactctgcctggttctatccactttataagctgtccagtggctcatctgttggccttccactcttccttcataatgagaatattataataattgcccttaagaatatcacagggttacctcatttatcacctgattatctctctagcccttcatactctcttccagcaacactgatcaatttttagttctcatgctctttccagactcctaacccttgcccatgcagttgtttatgtttaaaatgttctcctttccaatctcatttacctggtatgtgaagacatagcataaatggaaggctgcatcacaccttcatccagtgatcttgccatctagactgagttatctgcttagaccatggattctaaaatttgaatgtgcatcagaatcaaatgaaaagccagctaaaaattaatagctttgagtcatagccaaggctaaatttaccaaatttgtgataacttttgggagtttatagacctcaggtgattctgacactagagttttgtgtgaaccatactattaggttcaatgatttcgcttcttgtagcatatgcagatggtaatgtaaaagagaaatggaacagctaatgatttgcctggggagagacctgttaagtccttccctgggaagtgacctatggaaaagggatgctgattacattaatggctctggcattttctaaaacatgcaagtacttataccataatgaggctgtaagctccttgaaagttggggtggcacccagctcatccaagaagcccacttatcccctagtgctttgcactgaggacacttgaagagtttttgcttattatacaagtggcccattttgatggtgtttttctttgtaggtgaaattggaatcctttgcagtgccctccagaaaataaagtaaagccatggacagaatgtggtctgtcagctgtgaatctgttgatggagatccaactatttctttcatcagaaaaagtccgaaaagcaaaccttaatttgaaataacagccttaaatcctttacaagatggagaaacaacaaataagtcaaaataatctgaaatgacaggatatgagtacatactcaagagcataatggtaaatcttttggggtcatctttgatttagagatgataatcccatactctcaattgagttaaatcagtaatctgtcgcatttcatcaagattaattaaaatttgggacctgcttcattcaagcttcatatatgctttgcagagaactcataaaggagcatataaggctaaatgtaaaacacaagactgtcattagaattgaattattgggcttaatataaatcgtaacctatgaagtttattttctattttagttaactatgattccaattactactttgttattgtacctaagtaaattttctttaagtcagaagcccattaaaatagttacaagcattgaacttctttagtattatattaatataaaaacatttttgtatgttttattgtaatcataaatactgctgtataaggtaataaaactctgcacctaatccccataacttccagtatcattttccaattaattatcaagtctgttttgggaaacactttgaggacatttatgatgcagcagatgttgactaaaggcttggttggtagatattcaggaaatgttcactgaataaataagtaaatacattattgaaaagcaaatctgtataaatgtgaaatttttatttgtattagtaataaaacattagtagtttaaacaatt

SEQ ID NO: 472 - DNA, 17865 bp, Homo sapiens
  SITE (3404): n equals a,t,g, or c
  SITE (3412): n equals a,t,g, or c
  SITE (7177): n equals a,t,g, or c
  SITE (7218): n equals a,t,g, or c
  SITE (7232): n equals a,t,g, or c
  SITE (7256): n equals a,t,g, or c
  SITE (8216): n equals a,t,g, or c
  SITE (16053): n equals a,t,g, or c
tattctagtgggcagcccatccctcgagtggaatacatggaggaagaaaagaaaacatggggcacagtgttcaagactctgaagtccttgtataaaacccatgcttgctatgagtacaatcacatttttccacttcttgaaaagtactgtggcttccatgaagataacattccccagctggaagacgtttctcagttcctgcagagtaagtccacatcagggtcaatggccctgcagaaagttgggggaggattgaggcagaggagagggaaggggaagacaagtatgtggaggcaagtatgaaagcatgtgcttgtaggaatgcatgcaggttgattcctccaggaagaactaaatttcactgtgctctgccttccctccagcccctactgtgtttatccactttcattcaatcaaacacctgaggctgtggattttgccgtgtacctgtccctgaaaagtattttctttcacacttaaagcccaaggtgcttcactgaggtttttttttgttttgttttgttttgtttgccctgtagttcctgctgtgttatgagttaggagtgtgtgtttgtgtaagaaatgtgctattttcggggatggtgccaagagccctgagctctgagtctgtgcatctggtatgaatcctgccttcaatcctctccagctgagtaaacctgcctcagttttgtcatctgtcaaatggacactgtatcaactctttagcttttcccatagggaaattatgagaatgaagtaaggtgctgcatatggaaacaaccagcacagtcttgcatatacagcaggtattcagtgaatttggactgaattgaaatctgagtagcttaataggtaagtacattgagtcgcaagcctctctgtacagtatatccaggtgaaatgggtgttactctttctgtcaagaggatgttaatttagcaaaaacaaaataatgaactagcacatattgaacacctactgtgtgccaggtagaataagcagaagtggggagacagactacaggttacaaaattttctatatatcagagctgtgcagagatgggccactgtgggggcaatgagccagggaaattacttggcaggaagggaagttgtagccaggacagtttgggggtgagttagatgaccttttgggtcccttccattagaaagtctttgcttcttagataaagaagggagtaagggtccaagcagagtgtgcttcagcctgaagacacagagaacatgggggcaagaggcaaggggatctcaaagacttctttagctaattacttccattgccatggccaataataagaataataaaacagtaatactagcagttgggaagctacataatagtaattaagagaacagactttgaagctagactgcctgtggctgtgaccttgaataaaacctttaacctatctctgtctcagctttcccatcggtaaagtgggcataataaaagtgtctacttcatagggctattgtggggattagtagcatatctaaagtagcttaaaacagtgtcttacatacagtaggtcaaatatagtgttagctattattaccattatcactgtcactatccttatcctccaaagttgcaacaaactgagagacagatacaggaaccatagagatggtgatcagaggtcagctttaaaattgagcgatttagagaatgtgatatagatatgcacacaaatggacttgctaatattttaccccttaattaggtaaacttacctgccaattcatagagcatagtccattgcatggccaagagcagactggaatgaggtcctctgtgaacaatcaagagagaaagagcagtacagaaagagttaaattgacaatattcatattctcttcccaaatgctccagtcagacaggtcactgctacttatggggtagactgtgtgaggtgcagtacagaagctggaagcactctatccatactcttcccttctgggaaatgaggttcaaattccctcttcactctagaagcaggagaagtagggaatcattgttccaccctaacaaatggtaatgaaagctaaatttattgcatgtttccaatgtgctaggctctgtgctaagtactttgtattcattagctctttttattcttggaacatttctaagaagtatctatccacattatgcagatgaggaaactgaggctcagaaatgggaatttacttgatccagatcacctagctagaaagcagcgaggcagacatctgaagccaagtctgcctagcgtcaaagcctatgtccctgggcagttatgtgtactactccactacctaaaggtctcctagtgcctctgactcagtggtgatgagctttgagttttctttcttcttttcatcccagcttgcactggtttccgcctccgacctgtggctggcctgctttcctctcgggatttcttgggtggcctggccttccgagtcttccactgcacacagtacatcagacatggatccaagcccatgtatacccccgaaccgtgagtactgtcctccagctaccagttgccaggcacaatgagcgccatcttttcctgctgcaagaatgaggtttgggttcattgctggctggtccacaggactagttgtctagactgtttgctggtagtactaaaaacaattcatctattctggagatttgctccatccaagtagatagaccagactgattggagatttggtcatcctgtgatccaataactcagaactcccttggcagtgagaatgagagatcccaatcaagttccaaagtcaaagctacgaagttgcaaatgagaacaggaacaagtggcagccaagctatctcaatacttcctaagtatacatctagattactcttatctttctttgcctagattgtgtattgggtagaggtagagaattgcagccattatgcttcttacttgggtgttttgttatccccttagtctgataaaacttatgcaacttataaaaaaattaatggaacatccaaaattgtttttccttgcccataaagttcattgctacaaatccaaaaagacctgttccaaatggacatagcacatacagtgttaaataaatgtaggttttcttccctcactgctgtccacctccagactaacagaagagcagcactgtttttgttttagttcccagtggaatagctgagcatattgtatctgcccagggaagtcaataccagggagaagacaggatgagaagtgttcatgactcatagctcacttaggtatatgggagcatgtccacaggaatattagctcttctgcctggtaccccactggggatactcttaagacccttggctgctgtgccctaccctgcacctgtctcttatttttccttccttttcttctttntaccttgnaccctgccttttatgatcccaacctctgcatatcacttattcctgggagagggatcataagcctaaaagagttatttccattctttctgcccattcctcatgtagaaagactgagtctggcttggcttaaacctcctcccctccgagctctctgtgctttctgtctttcagtgacatctgccatgagctgttgggacatgtgcccttgttttcagatcgcagctttgcccagttttcccaggtaaggaatggattttttagccttctagttataggtctgtgacctgaatttctcaaatgagttgagcccagggaggggtcctcatgccctctgcaagagcggaaaccaggtacagttctatgatcccacctgaaatgggtgtgtggttctgggaagctaaatacccatttcggagatcaagcatggggttggtgaatcactcatcctctgaatcatatgtgtgttcttcagtgtactaatctcatttttcctgctagagcctttcatccatgaaagcctccctgattcccatgcaggaactacctcaccttcttccaatctcttagtacattccccttaccttttcagggctgttgcaactttctaccttgtcaggcagttatttgtgtatatgcttgaattaagtgaggtgacatttgccaagaatccaatgctgataccctgacttagagttaacaaagaaaaaaatgagctgaatatcttatcaccatcatcaaagctgcaaccctgcaacctagaatttcattcatctttcacagtggttaacaagctcaaaaaaaagctttctttttctttttctttcttttttttttcttttaaggcaaggtctcactctgtcacccaggctggactggagtgcagtggtataatcacggttcactgcagcctcagacttctgggctcaaacaatcctcccacctcagcctcctgagtggctgggactacaagcacatactttcatgcctggctgaatgttttaatttttgtggagacagagtctcactacattgctgaggctgacctcaaactcttggcctcaatcctcccatctcaccctcccaaagtgctaagattacaggcaagagccaccacacctggccaaaaaagaaagttttgggctgagtaaaataatgctaccaattctctccaggcactgagaggcagcctaaaaccatggtttggtagctgggatcatgagaaggttgaatggtgttctgatgtacctaggctccaaccctgccactaaccagctgtgtgacctggggttacattatcagccaccctgtgcctcagttttaataaaagtggatcagtcaaaagccctctccaccagtcatcttcctcacaaagaagcacaagaatcaaatggaatgacctatgagcaaatgctgagccaagtattgggatttcagaataatgggattgtgtgtgaatttaatgggcattttccctcagctggcagaaataaacattcccactgtcaaataaagaagctaccactaaatatttgaaacaaacaaacaaaaaagtggaatttattgcttgctaagtgagggaaaactgtacttgtaagatgcagcctctctaaacaaaaggaaaattacttttatgtgaggtttggggaattatggagttcaaagatcgttggacttttggaagtggaagtgtttcgggattagttgaactttaactgtagaagcatcaccaatgacattcagaagtgtggttactgctgccaagatatctttgattgcttgggacagttttaaaatctggatttgttactgtggccaaaaaacaatcagatttttccttgaagaataggaaccttttattcttaccaccagaagttagtttacgaagtcagaggctaagtggcagtcctccttaagccatttccactttggggaaccccacagaagagtggacagttgctcaagtcaacaaacaggagctcttggggcatcagtgtcacatggttccaactttgatctggacagttccaaggcagcaagtcatgttgaaagtttcctgagaacattcctttttgatcagaggcaggacttgcttcccactacagtacaggatggagtggggctggagcacagggaatgtggggccccccttgttgtaggcaaactctaggctcacaaagaatggtgactaagagaacaaggcgccattttggtcttggatttatcagtggtttctagttgaattgagagagcagatccaggctaagaatttgaatttggttcactctaaatcagaaagtattttataagcctaatctgaaccaggctctggacttggcccagggagtgatatagagatgcagaccatgtagcttcttgcttcaaagtgggtctaatcatagtcttcatctctgtctacaagcactcctctggtgatctcactcaatttcatggctttaaataccatctctactctgatgacggacacatttacatctgcagccaagacttcaatccccaaattcagacttgcatattgaattgcctattcaacatctccccttggatgtctataagacatctctaacatcctatccaaaactgagttctggatcttccttctcaaaccttctccagcacagctttttctattatcagttcataggaattccgcccttccagctgatcaaaccataagcactttgggacattaccaactcctttttctcttaaccccacagccaatctttcagaaaatcctgtgtgttctaccttcaaaatatgtgtagagtctgaccatttcaattatgtctactgctaccaacttggtctcagccactatcatttctcatcctagtgactgcggtagcctcctcagtggccccctctagtggtctctaccctggacccctccagtctccatgtgttctgtctacactcagcctctccagtctcctggtgtcccatttactctcaacctctccagtgtcctggtgtcccgtctacactcagcctctccagtctccttgtgttctgtctaccctccacctctccagtctcctggtgtccctttaaccctcagcctttcggtgccctggtattgtgtctacactcagcctctccagtctcctggtgtcctgtttaccctctacctctccagtctcctggtgacctgtctaccctcaacctctccagtctcctggtgtcctgtctactctccgcctctccagtgtcctggtgtcctgtctacactcagcctctccattctcctggtgtcctgtttaccctctacctctccagtgtcctggtgtcttgtctaccctcaacctctccagtctcctgatgtcctgtctacactcagcctctccagtctcctggtgtcctgtctaccctccacctctccagtctcctggtgtcctgtctatcctcaacctctccagtctcctggtgtcctgtctaccctccacctctccagtctcctggtgtcctgtctatcctcaacctctccagtctcctggtgtcccatctacactcagcctttctagtgtcctggtgtcccgtctaccctccacctcttcagtctcctggtatcctgtctaccctccacctctccagtctcctggtgtcctgtctacacttaacctctccagtctcctggtgtcctgtctatcctcaaccccttcagtctccttgttccctgtctaccctccagtctcctggtgtcctactctaccctcaacccctaccatctctttggtgtcctgcctntaccctcaactgctaccatctattctcatacagcaagcaanaaggagtgctttgntacacaagtgagatcatgaccatntatctgctcattaccctgcaatggctcctgtttcacttaaaggaaaaactcaagccctaaaacatctaaaaatattctacatgatctggctctggatccctctttgatatcacctgccactgccccctcactaattcttctccagccacattggttcctccctgtgtcttgacccaaacaacgctgccttttcttgggaaagaaatgcaagcttttgcactggctatatgcttggccaacagtgtgcttccctcagaagtcagtataaccaacaactccacttccttcaagtctgtgctcaaatatgaccttctcaatgatgcttaccctggaaccctatttaaaattgaagtctcccctgaatcccctggagctcttagtccctcttgtttatttcttcttttgtttcttctttccaaagaacttatattcttctaacatagttatgtatatgttcattatttattgtctgtctccactaaaactcacaagatgtctttactgattttatacactgcctggcacatcaaatgaacttaataaatattttgagagtgaattaatatatacagtaggaaagacacatacacacaaggcaggctgcagtaagtgctgtaaaagagacaatgagacagtagaggaattctgcaacagaagctgtggtgagaattaatctatgatgtgttagactctccagctatatatatgcctggaccgatgtcaccacttatctgcagttctcctgtgatgtttccagggtacatgattaagactcatttaacattccaggaatattctgctgatgaataatcactgagctggagtcaagagaagaagctttagatactaaccgaccctgtgatcatgagcaagtcacttcccttctctgtgcctcaatttcctcacttataaagtgaaaacaaagggccaagtgagggtggaaggatccccctaccctgnagatctgtgattctataacatatgggcaggaaagacttgataacacactcagggtctatgtgggctgttctgaaggcatctggccacccatcacctttttatggccaagtactaggttggttctgtggttccaattacaggaacagaacaggttctattttcccccaattacaggaaattggccttgcctctctgggtgcacctgatgaatacattgaaaagctcgccacagtaagtcccttctctccctgggtggatggtggagtgctataggctatggccctcaggtctttgaaactttcctactcccctggaagccaggttatctggggaaaaaaatcagaatgtggtgggttacatttgcacaagtgaaacttcacattttgatagatttctccttaataatttgattttgaaatcagctacctacagatgtttacatctcttaaattttaagcagtatcttgaacccaccaacaggctataatagtagcccttgaaaacccttggcataaagtgtgtgtatgaagtaatctggatccagagctttgaacatggaatgtttacatctctacttttcacaccagagcatacattaggatcttttctttctcagacatgagggagaaatgggggtgggctttccccttcttgctgaacactttcctctcctgagtatatctgatgacacttgtccactggggctatagaagcaattctacatagcaggtgatttccttccttcatactcgtttctaattttagtacatcccaccccagccactagccacattgcctgtcctggaagttgaaaaataaacatttataattgaattgtggactgccaatgagtgcaaatctattattaagatatatcagtttagaagcttatgaactcgttccatcaaaaggctaaaaactcccagaaggttatcttctcactgacagctgctttcaggtgctggacaagtggctttttcttcctcatctctaacaatgggatgcaatagctcatatcttgcccatctcaaaggcaactaaaaatttaactatttaaattgaattatttaaatttttgtgaacatgggtttttaaatgccagaggctacagagatacaaggagcggctttcaaagaagttacagagctagatagaatttctcatctctacaaagaaaataaacttggaagtcaaagcatcatgttatctgccataacaatattaaaatgacttatcaccaatgcgacttttctaaaaaattgttactgattgaaaaaatgttactgattggttgaggaacagtcctggattcttgctgcccttaatttgctgtgtaactacatgcatgttgccttaccttcctgggctgaagactcctcacctgtatgtgaggaggtcagactgactgagctctgacagccctcccaggtttaacattttctagtccaataaacagatgtaactaataacctacccctaattctccaaaactgtgactgtctccagcagctaactgagctctgggttcctcttagccccagaaccccaatattctttttttcaggccaactctctaggacatattgaactgtcagttattgaaagaaaagtacttggttatttgcataaatgcagtagttgacttcagaaacatccccaagttttagcatggatgatgggacattctcctcactgattctatcactacccagtctgctacctcccactgttgtgcctaatgagctctgccagcttcagagcatctgaggaacatctcagtctagttgacaccacagagaaaaaaacaaaagagatggaggagttcctgtcatatggagaacatattgttgggagcctccttttggggcttcttagtacctcctgatattttccatcatgctttacattcagccagcactcaacaggtgactagatagagtgagacacaggacacagagacgtgatcacaggtcatgctgattcagagaacaaacctgcacaggcttctacctgggcaatcctgtccatggcactggggcagttgctgccttctccttctttgaggtgtgtactagtcaaagatctccagagagaaagaaccagtgagatatatatagagagagaaagagagagagggaaatctgagaggggacttattaggggaattggcttacacagttatcaaggctgagaggtcccacgatatgctgcctgcaagctggagaacctgaaaagtcagtggcgtagattagtcaaagttcaaaagcctcagaaccatggaagttgatggtatagctctcagtctgagaccaaaggcctgagaacccctgggtggtggttgggtgcgagtcccagaatccaaaggccagaaagcctggagttctgatgtctaagggtaggagaaacagggtgtcctggttccaagagagatagaatacgtatgtggctttcctctgcctttttcttccatctgggattccagcccattgggtggttcccgcccacaatgaggaaagatcttccccactcagtccactgactcacatgccaatcccctccagaaacaccctcatagacatagacacaccccaaaataatgctttactatctattcaggtatcccttcatccagtcaaggtgacacataaaattaaccatcatagagtgtgctctcagattgactttccattccagatttactggtttactgtggagtttgggctctgcaaacaaggagactccataaaggcatatggtgctgggctcctgtcatcctttggtgaattacaggtatgaccttcacaggaaccaaggatagatttaaaagtggtgggtacagaaaaccattattgtgctttcaatattgttgaaaccctatttgtatccgttttgatatgcaacctgggaactcattctccagtgattggtaccttagcagctatgatttgatgatggctgtgggttttacagatagaaatggaattgcaagtacacatatctctggggagaaggggcctcctgattccaaggctgacctatgcatgcagccttgtgagtatgcaaacacatgccagaaagtgtggttggctcccacgtcatctattgaccaccttacttgaaagtaattggaatgaattactcctttctcccttggctgtaggttttagatgagctatgaagggtagaacctagtatgtgcaaagtaatttggctcacagcatttgggctgtgatgtagaaggaatcggggtgagatgagagaaggggcacaaatggcctatgggatgcagcagggaatactgatcctgatttaacagtgataataacttttcacttggggcctacagtactgcttatcagagaagccaaagcttctccccctggagctggagaagacagccatccaaaattacactgtcacggagttccagcccctctattacgtggcagagagttttaatgatgccaaggagaaagtaaggtgaggtggtgacaaaggtgagccactagctctgggggcctcctgactggtgccactcatctgtgggtggttggccaggagagtggactccaatgtctacagcaactttgtaccatagacagtttctctcccatgttctccaccctccttttcttccgttctctgttggaaggttgggcatgctgacctttgcacacacccctgccacctggtccctgttcaacgcaaccaccaagtcaagacactgaaccctcctgcatacagagtggccacagaagtctccccacaaaatcaaagaagtcttataacctaggaagtcctttcttcactttcttctcccaaacacctacaaaatttgcttcctcctttgtgtctttacccaaatttaatctctatatgtctttctctaaccaacttatttctactcatccctgccaccagtgcgtctgtaatacttattaacttgtaatatattacataaggtaagctccatgagggtagaaattttgttctttctattttctgtttttcctccagcccctggaacaatacctgacacagagtaagcactcaataaataattggtgaaggcattaatcccagaggcagttcagcaagaggctgatggagtggttctgggactctgagactgttggccctctgagtgcacagttcctgcacccaagcaggagacagactgggcagagggtccacctggacatgaatatcctaatactcactgtatgttaccacttaaaaaaatcttatcagtgatggatgacaggcatggaacatacaggcctttgggagtctatgacactgggtatgttagctttcaaccctatctatggcctctgagaggtcagaggaatggaggggagtggtgatagaataaatgacttctcaaagaaatccgcacttttgaaaagagagacatgagggaggaaagagagacataagggagaaagtcaaagacaaatgaacatacatcttagtccttcctttctaaatccaaattccatcccccccagacccctcacaaagaaaggtaaaaattatccttttgccagctcattcacttaccttacatttgcaaggtaagattgtgggacaagacaggtccagctaacatttgtttgagaaccctttggaataaagagacttcaaagaggactaactttctttcttttaaaatggatattccttaatttatgtctactatctttagataattaaaggtaaaatgctggcccacaaatccacttggtgtggcctaaaatgactatttctccagctctgtccagagctctcaagtccttctggctctgcttttttaattctctcctaaactgggagcctagcctccttccagcatcatccccctctccctccaaggcccaaggtttggacccaggcattggagcttagaggcagtgctgatgagcaccctgtcatgccaagatcacatttggatgggccctcctggagacaactctctaaccagcaagtgatcagtcccagaccagcagggaagagcttgccaggaaacaggcctgtcagtaccgaggcctcaagggaaacaaccatgaaaaccccattctgctgagaagtggctcagagaatcaaagagaatgctaaagaacagagttcaaaacaaggaatctgcacatccctttggattccctcaaagcatctcagccaagagaaaccaattctaaccacttggagttttaagattcaagttgtaggcagagatgtgattggctgagcatggttcacatgctacctcctttccagaggagggctggcaccgaatactgacttctggactgatacacacctagtagggtaggggtaaatcacccaaagcaaaaatgagctgctttatgggaagaaggaggaagaggtgcagagcaggcaaaatcacagatgtgtaacatgtggctcatgccaccagctgggttgagacagctcctttcagagaagaaggggtggaaatatatacttggccatttgttcttcatgaaagatagcaactaacactcatagggcacttacaccatagtataacagcatttgctgcaaccccctgaggcaggtaccactaatgccccaattttacagaggaaattggggtacagaagagtggtcccctgtgcccatggtcacaagggccataatagacagaggcagggtttcagcccaggcagcttgacttggaacttggggagccactcttgccaaacttggaggtccctactgtctcccgtaacattgtattttcagtacagcagcttataggttcaccagaggccaacttagaaatctgtgattactttgcaacatcttgttaatggtattgcatgatgtccctcatagaggccctcatggtggatttctcccagatccaggagtaaggcactgggaaggcaggaaagcaaagggtccaggccagtgtcagactgcctgggttccttcccagctgcataacttactgacagtatggccttagtagtcacgcagccttcccaagcctgtttcctcatccataaaatgggtatagcaatggtgcctttctcctaaggtttttgtgaaggttaaataaggaaggatatttgtaaagagcattggacagttagaacttaacatagttcttggaacatagaaggtactccatcaatgttaaatttcattattaacatagtgctttcttcaccacttgagagctatttccctctgcattgattgtcaaccatttcagagcttttttccctctatatagcattctttagctagattttacttactcttgattttatttaatgataggagtttgtggctttattgtattcagtagtttcattgtaagctatctctgtcttcttggagccaggggactaaataaacatgtgtatatatgtgtttgtacatacacatacacacatacagaggcttcccaagaagactcattaaaactccattccccccgcctcagccctggctgttgaagaccctgctctagggaggtgtccgtgttcctaaaaaagaagtaaaatgccactgagaactctcttaagactacctttctccaaatggtgcccttcactcaagcctgtggttttggtcttaggaactttgctgccacaatacctcggcccttctcagttcgctacgacccatacacccaaaggattgaggtcttggacaatacccagcagcttaagattttggctgattccattaacagtaagtaatttacaccttacgaggccactcggtttctcagtaatcgaagactgtctttccctaccatcgccataggaaaaataataaatttattgaaatatttaattaaggagaaaagcacctccatgtaagccatgggttcattgatggagaagaacttgacaaaaaggtcagaattacccttgtgtcctttttcctttgaccttcctagattccactcccacctcctaccatcattccacctttccacacttggtctgtcactgccatgttcctttttctccctcgcctctccatcccttctacgctaagtgtccagttgttatcactctgcctggttctatccactttataagctgtccagtggctcatctgttggccttccactcttccttcataatgagaatattataataattgcccttaagaatatcacagggttacctcatttatcacctgattatctctctagcccttcatactctcttccagcaacactgatcaatttttagttctcatgctctttccagactcctaacccttgcccatgcagttgtttatgtttaaaatgttctcctttccaatctcatttacctggtatgtgaagacatagcataaatggaaggctgcatcacaccttcatccagtgatcttgccatctagactgagttatctgcttagaccatggattctaaaatttgaatgtgcatcagaatcaaatgaaaagccagctaaaaattaatagctttgagtcatagccaaggctaaatttaccaaatttgtgataacttttgggagtttatagacctcaggtgattctgacactagagttttgtgtgaaccatactattaggttcaatgatttcgcttcttgtagcatatgcagatggtaatgtaaaagagaaatggaacagctaatgatttgcctggggagagacctgttaagtccttccctgggaagtgacctatggaaaagggatgctgattacattactggctctggcattttctaaaacatgcaagtacttataccataatgaggctgtaagctccttgaaagttggggtggcacccagctcatccaagaagcccacttatcccctaagtgctntgcactgaggacacttgaagagtttttgcttattatacaagtggcccattttgatggtgttttctttgtaggtgaaattggaatcctttgcagtgccctccagaaaataaagtaaagccatggacagaatgtggtctgtcagctgtgaatctgttgatggagatccaactatttctttcatcagaaaaagtccgaaaagcaaaccttaatttgaaataacagccttaaatcctttacaagatggagaaacaacaaataagtcaaaataatctgaaatgacaggatatgagtacatactcaagagcataatggtaaatcttttggggtcatctttgatttagagatgataatcccatactctcaattgagttaaatcagtaatctgtcgcatttcatcaagattaattaaaatttgggacctgcttcattcaagcttcatatatgctttgcagagaactcataaaggagcatataaggctaaatgtaaaacacaagactgtcattagaattgaattattgggcttaatataaatcgtaacctatgaagtttattttctattttagttaactatgattccaattactactttgttattgtacctaagtaaattttctttaagtcagaagcccattaaaatagttacaagcattgaacttctttagtattatattaatataaaaacatttttgtatgttttattgtaatcataaatactgctgtataaggtaataaaactctgcacctaatccccataacttccagtatcattttccaattaattatcaagtctgttttgggaaacactttgaggacatttatgatgcagcagatgttgactaaaggcttggttggtagatattcaggaaatgttcactgaataaataagtaaatacattattgaaaagcaaatctgtataaatgtgaaatttttatttgtattagtaataaaacattagtagtttaaacaatttcactgtttcagttatttcctggaatgaaatattcctctcactgccttagaaatacattagctagatagttttgtaacatgagaaaatggccagaggctcatatctccaaccctttgcaggggctccttgtgacactcaaagtcatgcctggacagtcaacggactttgacttttgttgattgtgtgtttgccatgaaaacatgaatatctgagaagcagtggggagaaaaaaaacaatatctttgtagctatgatttgaaattctcatactactttacattttattttggaaatagttaagtcttaaagaatttgcatagtgtttctttgagtttagttctcagaacagctgtagtatcatcaacagcaaattctgggtaccttcccagctccacccaatttgaatctctgaagataaggcccagagacctgtatttttaagtaccccatttttttaattattcatagccaaattctatcaggtacattcagtttgagaaaacctgatttgtggtggtcagtctgccactgccaatgatgtcaatgtggataagctgtttcccttctttagacctcagtgtcactctaacaatgagggagttaaactttataaaccaaggtccattgcagccttgaaatatgattcaagtgttcatatgtgtctttatatagctatgcctgatccactgatggggtgttacaatacctgcttatatatgccagctgggaggaaagaggaatttactgaatgtgtctgaagtttcattgttttgaagttggaattttatgcctgtatctatgtttatgcctttgtaaaacccactgattttaaaagtgaaa

SEQ ID NO: 473 - DNA, 6314 bp, Homo sapiens
ttggggcctacagtactgcttatcagagaagccaaagcttctccccctggagctggagaagacagccatccaaaattacactgtcacggagttccagcccctgtattacgtggcagagagttttaatgatgccaaggagaaagtaaggtgaggtggtgacaaaggtgagccactagctctggggcctcctgactggtgccactcatctgtgggtggttggccaggagagtggactccaatgtctacagcaactttgtaccatagacagtttctctcccatgttctccaccctccttttcttccgttctctgttggaaggttgggcatgctgacctttgcacacacccctgccacctggtccctgttcaacgcaaccaccaagtcaagacactgaaccctcctgcatacagagtggccacagaagtctccccacaaaatcaaagaagtcttataacctaggaagtcctttcttcactttcttctcccaaacacctacaaaatttgcttcctcctttgtgtctttacccaaatttaatctctatatgtctttctctaaccaacttatttctactcatccctgccaccagtgcgtctgtaatacttattaacttgtaatatattacataaggtaagctccatgagggtagaaattttgttctttctattttctgtttttcctccagcccctggaacaatacctgacacagagtaagcactcaataaataattggtgaaggcattaatcccagaggcagttcagcaagaggctgatggagtggttctgggactctgagactgttggccctctgagtgcacagttcctgcacccaagcaggagacagactgggcagagggtccacctggacatgaatatcctaatactcactgtatgttaccacttaaaaaaatcttatcagtgatggatgacaggcatggaacatacaggcctttgggagtctatgacactgggtatgttagctttcaaccctatctatggcctctgagaggtcagaggaatggaggggagtggtgatagaataaatgacttctcaaagaaatccgcacttttgaaaagagagacatgagggaggaaagagagacataagggagaaagtcaaagacaaatgaacatacatcttagtccttcctttctaaatccaaattccatcccccccagacccctcacaaagaaaggtaaaaattatccttttgccagctcattcacttaccttacatttgcaaggtaagattgtgggacaagacaggtccagctaacatttgtttgagaaccctttggaataaagagacttcaaagaggactaactttctttcttttaaaatggatattccttaatttatgtctactatctttagataattaaaggtaaaatgctggcccacaaatccacttggtgtggcctaaaatgactatttctccagctctgtccagagctctcaagtccttctggctctgcttttttaattctctcctaaactgggagcctagcctccttccagcatcatccccctctccctccaaggcccaaggtttggacccaggcattggagcttagaggcagtgctgatgagcaccctgtcatgccaagatcacatttggatgggccctcctggagacaactctctaaccagcaagtgatcagtcccagaccagcagggaagagcttgccaggaaacaggcctgtcagtaccgaggcctcaagggaaacaaccatgaaaaccccattctgctgagaagtggctcagagaatcaaagagaatgctaaagaacagagttcaaaacaaggaatctgcacatccctttggattccctcaaagcatctcagccaagagaaaccaattctaaccacttggagttttaagattcaagttgtaggcagagatgtgattggctgagcatggttcacatgctacctcctttccagaggagggctggcaccgaatactgacttctggactgatacacacctagtagggtaggggtaaatcacccaaagcaaaaatgagctgctttatgggaagaaggaggaagaggtgcagagcaggcaaaatcacagatgtgtaacatgtggctcatgccaccagctgggttgagacagctcctttcagagaagaagaggtggaaatatatacttggccatttgttcttcatgaaagatagcaactaacactcatagggcacttacaccatagtataacagcatttgctgcaaccccctgaggcaggtaccactaatgccccaattttacagaggaaattggggtacagaagagtggtcccctgtgcccatggtcacaagggccataatagacagaggcagggtttcagcccaggcagcttgacttggaacttggggagccactcttgccaaacttggaggtccctactgtctcccgtaacattgtattttcagtacagcagcttataggttcaccagaggccaacttagaaatctgtgattactttgcaacatcttgttaatggtattgcatgatgtccctcatagaggccctcatggtggatttctcccagatccaggagtaaggcactgggaaggcaggaaagcaaagggtccaggccagtgtcagactgcctgggttccttcccagctgcataacttactgacagtatggccttagtagtcacgcagccttcccaagcctgtttcctcatccataaaatgggtatagcaatggtgcctttctcctaaggtttttgtgaaggttaaataaggaaggatatttgtaaagagcattggacagttagaacttaacatagttcttggaacatagaaggtactccatcaatgttaaatttcattattaacatagtgctttcttcaccacttgagagctatttccctctgcattgattgtcaaccatttcagagcttttttccctctatatagcattctttagctagattttacttactcttgattttatttaatgataggagtttgtggctttattgtattcagtagtttcattgtaagctatctctgttttcttggagccaggggactaaataaacatgtgtatatatgtgtttgtacatacacatacacacacacagaggcttcccaagaagactcattaaaactccattccccccgcctcagccctggctgttgaagaccctgctctagggaggtgtccgtgttcctaaaaaagaagtaaaatgccactgagaactctcttaagactacctttctccaaatggtgcccttcactcaagcctgtggttttggtcttaggaactttgctgccacaatacctcggcccttctcagttcgctacgacccatacacccaaaggattgaggtcttggacaatacccagcagcttaagattttggctgattccattaacagtaagtaatttacaccttacgaggccactcggtttctcagtaatcgaagactgtctttccctaccatcgccataggaaaaataataaatttattgaaatatttaattaaggagaaaagcacctccatgtaagccatgggttcattgatggagaagaacttgacaaaaaggtcagaattacccttgtgtcctttttcctttgaccttcctagattccactccacctcctaccatcattccacctttccacacttggtctgtcactgccatgttcctttttctccctcgcctctccatcccttctacgctaagtgtccagttgttatcactctgcctggttctatccactttataagctgtccagtggctcatctgttggccttccactcttccttcataatgagaatattataataattgcccttaagaatatcacagggttacctcatttatcacctgattatctctctagcccttcatactctcttccagcaacactgatcaatttttagttctcatgctctttccagactcctaacccttgcccatgcagttgtttatgtttaaaatgttctcctttccaatctcatttacctggtatgtgaagacatagcataaatggaaggctgcatcacaccttcatccagtgatcttgccatctagactgagttatctgcttagaccatggattctaaaatttgaatgtgcatcagaatcaaatgaaaagccagctaaaaattaatagctttgagtcatagccaaggctaaatttaccaaatttgtgataacttttgggagtttatagacctcaggtgattctgacactagagttttgtgtgaaccatactattaggttcaatgatttcgcttcttgtagcatatgcagatggtaatgtaaaagagaaatggaacagctaatgatttgcctggggagagacctgttaagtccttccctgggaagtgacctatggaaaagggatgctgattacattaatggctctggcattttctaaaacatgcaagtacttataccataatgaggctgtaagctccttgaaagttggggtggcacccagctcatccattaagcccacttatcccctagtgctttgcactgaggacacttgaagagtttttgcttattatacaagtggcccattttgatggtgtttttctttgtaggtgaaattggaatcctttgcagtgccctccagaaaataaagtaaagccatggacagaatgtggtctgtcagctgtgaatctgttgatggagatccaactatttctttcatcagaaaaagtccgaaaagcaaaccttaatttgaaataacagccttaaatcctttacaagatggagaaacaacaaataagtcaaaataatctgaaatgacaggatatgagtacatactcaagagcataatggtaaatcttttggggtcatctttgatttagagatgataatcccatactctcaattgagttaaatcagtaatctgtcgcatttcatcaagattaattaaaatttgggacctgcttcattcaagcttcatatatgctttgcagagaactcataaaggagcatataaggctaaatgtaaaacacaagactgtcattagaattgaattattgggcttaatataaatcgtaacctatgaagtttattttctattttagttaactatgattccaattactactttgttattgtacctaagtaaattttctttaagtcagaagcccattaaaatagttacaagcattgaacttctttagtattatattaatataaaaacatttttgtatgttttattgtaatcataaatactgctgtataaggtaataaaactctgcacctaatccccataacttccagtatcattttccaattaattatcaagtctgttttgggaaacactttgaggacatttatgatgcagcagatgttgactaaaggcttggttggtagatattcaggaaatgttcactgaataaataagtaaatacattattgaaaagcaaatctgtataaatgtgaaatttttatttgtattagtaataaaacattagtagtttaaacaatttcactgtttcagttatttcctggaatgaaatattcctctcactgccttagaaatacattagctagatagttttgtaacatgagaaaatggccagaggctcatatctccaaccctttgcaggggctccttgtgacactcaaagtcatgcctggacagtcaacggactttgacttttgttgattgtgtgtttgccatgaaaacatgaatatctgagaagcagtggggagaaaaaaaacaatatctttgtagctatgatttgaaattctcatactactttacattttattttggaaatagttaagtcttaaagaatttgcatagtgtttctttgagtttagttctcagaacagctgtagtatcatcaacagcaaattctgggtaccttcccagctccacccaatttgaatctctgaagataaggcccagagacctgtatttttaagtaccccatttttttaattattcatagccaaattctatcaggtacattcagtttgagaaaacctgatttgtggtggtcagtctgccactgccaatgatgtcaatgtggataagctgtttcccttctttagacctcagtgtcactctaacaatgagggagttaaactttataaaccaaggtccattgcagccttgaaatatgattcaagtgttcatatgtgtctttatatagctatgcctgatccactgatggggtgttacaatacctgcttatatatgccagctgggaggaaagaggaatttactgaatgtgtctgaagtttcattgttttgaagttggaattttatgcctgtatctatgtttatgcctttgtaaaacccactgattttaaaagtgaaa

SEQ ID NO: 474 - DNA, 455 bp, Homo sapiens
caatattgaagagtgagttttagtccagtaaagatgttttaatgagcttgaaggtaaagtttcggttaagttatgattttcacaggaagttacatactgaatgaaagataatatttgtatttttggtaatgtgctactcagttcttagctcttttttatccagatataaaagcccagtctatagctatgggatttaataaatttccaatatgtaagtgtttttatttgtttaatttctagtaaatgagcaatattttagaaacagtatcagtctttactgacagatgatcttgctgagtacaatcaaaataaatacataaaaaattctaagcatgtggcattgatgtttaataagtttctgaaagtaggaatctgaattttaactgtaggtttctaagttatataatttagttgtgtttcaaaaaatccaccaataaaatgtcagctttataaaa

SEQ ID NO: 475 - DNA, 456 bp, Homo sapiens
caatattgaagagtgagttttagtccagtaaagatgttttaatgagcttgaaggtaaagtttcggttaagttatgattttcacaggaagttacatactgaatgaaagataatatttgtatttttggtaatgtgctactcagttggttagctcttttttatccagatataaaagcccagtctatagataaaaaatttaataaatttccaatatgtaagtgtttttatttgaataaaatctagtaaatgagcaatattttagaaacagtatcagtctttactgacagatgatcttgctgagtacaatcaaaataaatacataaaaaattctaagcatgtggcattgatgtttaataagtttctgaaagtaggaatctgaattttaactgtaggtttctaagttatataatttagttgtgtttcaaaaaatccaccaataaaatgtcagctttataaaa

SEQ ID NO: 476 - DNA, 4839 bp, Homo sapiens
ggccgctccgttagggatggcacctttcgccgggcacagcgtcgaagcttcactccagctagctttctggaggaggacacaactgatttccccgatgagctggacacatccttctttgcccgggtaagaagtgcccggggtgtccccccaccccacgttcccttcctgcctgtgtccaccctgacctcatgtgtttgctcaggaaggtatcctccatgaagagctgtccacatacccggatgaagttttcgagtccccatcggaggcagcgctaaaggactgggagaaggcaccggagcaggcggacctcaccggcggggccctggaccgcagcgagcttgagcgcagccacctgatgctgtgagtgcggcaggcagggaaggggggcagagagagaccccggggcccgtcaggaacagctgggcgagtatcggcattcacctctgtgggcgatggaaggggtagcctcagggactgggaactcactactcactgggccaccaggggtgggagacgcagggctgggcatggccccagtctcatggcttgcctgtggaatgggacagcaatcttagaacccaggggctgggcagaatccaacggggaggcggaggtgacagaggtgatacttgctgagttgcagaagtcagtgtgtccccgttccagctccctgccatccccggaggcccgcagtgttgcttttttactggcaaggagaaggcagatgccgggcgacttgcgcagcatattcgccaggatagagacagggtgccctggtgcccctcggggagggactgcagcagtttgcggggctggggcgggaggtgaatgccggctccctccaggcccttggagcgaggctggcggaagcagaaggagggcgccgcagccccgcagcccaaggtgcggctccgacaggaggtggtgagcaccgcggggccgcgacggggccagcgtatcgcggtgccggtgcgcaagctcttcgcccgggagaagcggccgtatgggctgggcatggtgggacggctcaccaaccgcacctaccgcaagcgcatcgacagcttcgtcaagcgccagatcgaggacatggacgaccacaggtaggcgtggcaggcaaggcctgggttgggatggaggctcccgggggagggtgggggctccgggtcggggatgaggcccccgctgacgctccaccccgcaggcccttcttcacctactggcttaccttcgtgcactcgctcgtcaccatcctagccgtgtgcatctatggcatcgcgcccgtgggcttctcgcagcatgagacggtggactcggtgagcccctgtgccttccctgggcccagacgagtggagtccgggcactggaccccctcccgacccgctctgggaggagagggccagagtcggggcccgtctgatcccgctccccaacctcccaggtgctgcggaaccgcggggtctacgagaacgtcaagtacgtgcagcaggagaacttctggatcgggcccagctcggtgaggacggggctgggggcggggccggcgggggcgggacctggaggtgcccggcgggggcaggaggccccggactgcggccgctcgtctccctcgcccgcaggaggccctcatccacctgggcgccaagttttcgccctgcatgcgccaggacccgcaggtgcacagcttcattcgctcggcgcgcgagcgcgagaagcactccgcctgctgcgtgcgcaacgacaggtcgggctgcgtgcagacctcggaggaggagtgctcggtgcgtttccccgcccgggactcccgccttcgtctgcccggtgttcgctcttcagacctcagatagactcggcagagtgatccttcgccctcgttcctggcacatcccgccgtccttacgcgcaaggccttgtcatattcattcctcctcatccccaccctcccccatctccagctcctcgccccgtagaccatcatctgatttggtcttttgatttgggtgtactcttccagcatgtgtcttaaagcttacataagtggtatttgcctcttttccactaagcaatttttaaaaaaattcatcccaactttcatcacatcatcttatgtggaagtgccgtagtccataccagttccctgatttaggacacagaggttgtttctgattttcagctaacaggaattatgccgtcaaactccttgtaagagtcttttccaacatgcacgtgcatctcaagagtgggggtgacttgtagaagcggagggaagagctcagtggttttgccttcgactcctgactccctgcgtgcccctcattgccctgacccaactggacctgaccctgtgtccccctcccacagtccacgctggcagtgtgggtgaagtggcccatccatcccagcgccccagagcttgcgggccacaagagacagtttggctctgtctgccaccaggatcccaggttagtcctgccggcagctctctcacctgcctttgtccacaccttccccgggggctgtggtgcagagggtgtaggggctcctcttgttggcgacttggctggaagggtgccaatgctaggggctcgaagccggtctgaccacatacttggctcatgcagggtgtgtgatgagccctcctccgaagaccctcatgagtggccagaagacatcaccaagtggccggtgagctgcagtgggggggttgttagggagccctccgtgtcatgtgggggagaatgccacaccccacccactggtgataccagagattcccatcatgggaccacctcacgttttcagaggctgtgcacctgccctttgtacagcctgtccatcaaccagcgcctgcccctctgagcaagtagatcaagagaactagatggagacttgaaaggtcaagtgacattattccagtttgatagagactcagtgtggtggcctgcttgaagtcaaggaagccacaccgttttctgctttatgagcccacccatctttgcctctacccccaaacgtggtgtggggccaaaggttgggggaggccctgactcagctcgtcctcatttgtgacccagatctgcaccaaaaacagcgctgggaaccacaccaaccatccccacatggactgtgtcatcacaggacggccctgctgcattggcaccaagggcaggtacgtgtgcgtgccagcgagtgcagctggtctctgggctcagagcatcgccctagggcgtgccttctccctaaccaaatcctgaaataagccagtataccaaggatgtggggttagagggggtctggacttccttggggccaacaaaggtgggtaggtgcggctgaaactcgccctggatgccagcaatccccctctgcaaggcagcagtctccgaaccctggcctgcctttctaggtgtgagatcacctcccgggagtactgtgacttcatgaggggctacttccatgaggaggccacgctctgctctcaggtaggtctgcagagtgtccgtcgttcccctcccccagctactgtgatgctgatatgctgctctgcgcaggtgcactgcatggatgatgtgtgtgggctcctgccttttctcaaccccgaggtgcctgaccagttctaccgcctgtggctatccctcttcctgcacgccgggcaagtgacactgtgggccgggtcgggggtctcagggccctcaggattggctggctgggggtggcagaaaggtcacttccctgctgaatgtctcccgacccccgcctgctactgactacaggatcttgcactgcctggtgtccatctgcttccagatgactgtcctgcgggacctggagaagctggcaggctggcaccgcatagccatcatctacctgctgagtggtgtcaccggcaacctggccagtgccatcttcctgccataccgagcagaggtaaggctggccctcagggtggggatcctcccgtgtgcacctgcagcctgctgtgaacctgtccatatcgagcactgagtctgggagcatctccagttggatcctcggtcccaatatgctctgggccatgggaagtggggcagaaagatgaggccttgggtccagggggcctgcccagccccactgccttacagctaccccaaccatcccccaggtgggtcctgctggctcccagttcggcatcctggcctgcctcttcgtggagctcttccagagctggcagatcctggcgcggccctggcgtgccttcttcaagctgctggctgtggtgctcttcctcttcacctttgggctgctgccgtggattgacaactttgcccacatctcggggttcatcagtggcctcttcctctccttcgccttcttgccctacatcagctttggcaagttcgacctgtaccggaaacgctgccagatcatcatctttcaggtggtcttcctgggcctcctggctggcctggtggtcctcttctacgtctatcctgtccgctgtgagtggtgtgagttcctcacctgcatccccttcactgacaagttctgtgagaagtacgaactggacgctcagctccactgagctggctgcgggctccagcggccgtgtgctccagcaggccagagccagacacgacctccctgagcctcacaggcttacaggagtcacctgctccatgtggggactggcctgtttcctgaacacagacctctttcttgtgccttgttcacttctgttgaacccctcgtactgccgggcatttattatactacttcctgtcataaccttctaacttgtttcttgacgaccacctcatgtggccaataaatggactgggagcgttttagctgccattaacttga

SEQ ID NO: 477 - DNA, 348 bp, Homo sapiens
ggccgctccgttagggatggcacctttcgccgggcacagcgtcgaagcttcactccagctagctttctggaggaggacacaactgatttccccgatgagctggacacatccttctttgcccgggtaagaagtgcccggggtgtccccccaccccacgttcccttcctgcctgtgtccaccctgacctcatgtgtttgctcaggaaggtatcctccatgaagagctgtccacatacccggatgaagttttcgagtccccatcggaggcagcgctaaaggactgggagaaggcaccggagcaggcggacctcaccggcggggccctggaccgcagcgagcttgagcgcag

SEQ ID NO: 478 - DNA, 3814 bp, Homo sapiens
tgcaaaccctaaagccgctctgcttttatttcctccttgctgtggagatcatggtaacacagttgtgtggtttggggagtggtgtggcctcaaggctttggtggtgtggcgccatcttggactataggactcgcctgtaccaattctctccccttaactcacctctgtgatggggcaatctcagtctttgctacccaggttactgtggctttctacttttcaaactaagaagcaaacaggtttattttatacagtgggccaggccgtgggtctgccatgtgactagggcatttggacctagggagaggtcagtctcaggccaagtacatgaaaggagggagcactggctcaccctgtcctagtcctgagggcccccaggtttatgctgacagttactgttgggcatgcctggggtgaggccaccacaacgtcctttctgtgaaagaggcacgatgattcgaggacccattcctgctgggaaaaagctcagccaccagtgatgaagagggttgtcctgtctggaggctcacttttgcctcagctttttgatgaaggaaacctcgtctcgattccggatgccgtagctgaaaaagaaggaaaggcataaagcacctgccctacagaaggacatatctgtgactcccctcctgaggctgtggaggaccacgaagaaacaacagaggggaggcgtgtggcttctgggaaggccaggaagtggcagtggccatcctctcacagacccagaagcactccgactcacaagtccccggggcagggaactgagtgtcagatagagtcacagcctttcgcctccatgcccactctgatttcctccctcctggcactgtgtagccctaagctgccactggtgggaagcagcaaggcccctccaggtgccctctgcctgccattctcctagtggggagggccccaaggaagctccttggaggagggtgttatctccggagagggagccgcagccctctggcagagcatgggggactaaggggcaacagaacagcggtgccctacggctcaggacgtggccggcacttactctcggagcttctttctgtcttccgtgagtttctctcctgcagaggtcagatggtacgtcctccacacgtaggacctgcaagaggggaatgcaggtaaaccacgtgccctgagcagggtgagctgagtggctctgcatgacgtgggcttgaggcatgcagtcctatgggacctggggcagctgtcctccctacctgggctgttctgtacaatgtgcagattgggtctgaggcagctacaaggaggctctgttctcagagggctgtctggggcggcttggccaaacaaaccttgctaatgcaacaggcgacagtgttgagactcagtgaacaggatagttgatccaataggagagtgagggctgacagcacccaggtgagaaggggatgggagcccctacaggtgtaccatccaaaactagggaggccacttccagacacactggaaattcccgacagtgtccccaagtgaagatacccagcagctcggatggggtgatgccgatggaagagcagaatgttggggatggccgaggcaggagtcccaggcacagaacgacccgcactgtctgtgacagggagctcatcactcttgtgacagggagctcatcacttcagtggtgctgtactcatgcagagctgagagctgtttccaggtggtgcctggtgacagtgccaagaagggcactagccccacgaagggctataatgaagggaatgttgttccacttaccagctgatgtgctgaatgcccccttcacgctcctgcttgagctgcacgtatctctggatggccttcttcaggtccaggactgtggcactctgcactacaaccacggctgcaaccacggacacagatgggagaagatccatggtgagaacccaaagccacagcctccgatggcaggaaaggaaccaacacctctgtgcacagggcaggtttgtggttgccccagtacccctgggcatggcctgtgagtttctgagcaggctgaccagcactgttaggtcttcctgctgtgaaagcctggaccacataacctgaagggaggagggtagcacttacgcattacttctccatccatcttgcacactcggaccgtcattgcctggccgtattctagggctatttgggagttgacttcttccagagtaacctacaaaagaccaagggcagaagtgggaaccctggctctctttaccaccttgagcaacaacaaagaacaagccgatagtggccaaaaagtggtgctccattttacgaagggcaaggaagggtggttgcctgtacgttacggtttcccaattcatcagagccccaatctcatgttccactcacattttaatgtccatagtggacagagtctctgggggaaagaggtgctaagaaacaggcaagagaataaactcacatgaggacctgcccccaggggtgggtagaggcctgtcagttcacgctgagtatatccctgatcatcaggacccaggccaggcttcgggactgagtaaggcaggtgtgcaaaatttaccggggcagcaaaacacggtaataacaataaatattttaatacaacatttaagaaatacaaggcaattaaaatatccatgatgagcaaaatataaaacatttaaaattggccgggcgcggtggctcacgcctgtaatcccagcactttgggaggccgaggcgggcggatcatgaggtcaggagatcaagaccatcctggcccaacatggtgaagccccgtctctactaaaaatacaaaaaattagccgggcgtggtggcgcgtgcctgtagtgaacccgggagggggaggttgcagtgagtcgagatggcaccactacactccagcctggcaacggaccaagactcagtctcaaataaataaataaataaataaaaagacagtatcgtcccaaagcatgatactgacgctttgacacatgattgacgcttgaggcaaatggaacaatcagtactactaatcttgctcttatttaaaactaaatttttcttttaccgtaggctctttttttgcctcaactttgacttttaaaggtattacaggccaggcgggtggctcacacctaaatcccagcattttgggaggccgaggcaggaggatcgcctgagcccaggagtttcagatcagcctgggcaacatagtgagactccctctgtacaaaatatttaaaaattagccgggtgtggtagcgcgcacctgtggtcccaattactcgggaggctgaggtgggaggacgccgctgcactccagcccgggcaacgcagcaagaccctgtcccccgagccccctaaatacaattacattaaaatgtcatttgatgtcactcactaatgaggtttttggttcctctttaagcttcgcgccccaggcgagtgcgcccggtcaaggttaaaaccctcgtttacgcccagaggcgccttcctcagccttgggccgcagtctcccaccagcaccttcggaggctgccggcgcccggatgcccggacccccggggaacgactcccgcgcccccagcccccgcccgcacacacctggatcggcagatcgcagagcagcgggtcctgcaccaccatagccagaccctcctggaacacgtccatggcctcggagtgcggcagcgcctcttcttcgtcctcatcttcctcttgcgcctcggtcccacccgcggcctccgtctcctccagggccgcccctctcagccgggctctgcccgcactgccagcccgcactag

SEQ ID NO: 479 - DNA, 1841 bp, Homo sapiens
tgaggcgacaggctttcctgaggagtgtgagtatgccagccgagacagcccacatctcttcaccccaccatgagctccggcggccggtgctgcaacgccagacgtccatcacacagaccatccgcaggtaccaacaccgcccagctgctccatggggtgggagctgggggctggtggggcagaggcaggtacacagaggatggaaatgagaacaagggccctcttgtttcagcttcctcctccatctcggtccccaccatccccttgccctcctcctgttctggatactgaccgctctcaccccactaccctgctccactcccttctcttcagcactcactctctccttctctgtctccaccgcccggatgctcttgcctcttagcagccgacaagtacgcttcgggcgtgtccacactctgcccctcttgggtccccgggctgcccgcagggccttcccacagcgccagtctctctcttggtccctgctcaggtatctcatacaggtcatgagtgtgttggtgttttctggcatgtgcttggcatgtgacctcttgggagctgccagtgtggttggcattccctggggctcctaacggcaggtgctggcagtgtttttgtttgcatgtccaagtgctgtggacagcctgcctgggcccgtaagcacctgctgtctgagctctgtggtgtcctggggccaagctctctcgggttgagctctcagctccttctctggactcagtgcctcccctcaactgcccctcagggatggtggggtgagggcctctatgaagcactcaaccgggcaaggccagctgcggtctagtggaaacttggagttggctaacagttcagggggtggctggaacccactcatcctcttattagaccttgcccacccagaccctggtccctggagtgactacaggcctggggcagggcatgctgccccggaggagggcctttgaagtcccctgcctgggaggggcgatctggccgccccttgctgagtccctgccatgccagggggaccgccgactggtttggagtgagcaaggacagtgacagcacccagaaatggcagcgcaagagcatccgtcactgcagccagcgctacgggaagctgaagccccaggtcctccgggagctggacctgcccagccaggacaacgtgtcgctgaccagcaccgagacgccacccccactctacgtggggccatgccagctgggcatgcagaaggtatgcctgcctgttgctgcctcctgcaggcccctccttccgctctcaggggctggggctgcggacacagccagcctgagcagaagggactctctgggagctcacagtctggaagggcagtcagacagcctgctcgtgaaggcacctgaaacagtctctgggaaggggtaccttgggatggggacatggtcttgggattgcaccagggggccagtgtctggatgggagagcattccaggcaggacctctaggtgctgtggggtgggagtggtggccatagagctgtccaggggcccgtgaggagtcaggagcagcagtcacgctgtctttgcaaggcctctgtgcctctgggtgagctaggagcccccatggtcctgactccagcatctcctcccctcctccagatcatagaccccctggcccgtggccgtgccttccgtgtggcagatgacactgcggaaggcctgagtgccccacacactcccgtcacgccgggtgctgcctccctctgctccttctccagctcccgctcaggtttccaccggctcccgcggcggcgcaagcgagagtcggtggccaagatgagcttccgggcggccgc

SEQ ID NO: 480 - DNA, 243 bp, Homo sapiens
agctcttaagccactgcctgatggtgaccctggccgcccacctccccgcagagttcacccttgcggtgcacgcctccctggacaagttctggggtttctgtgaggcccggtgctgacctccaaataccgttaagctggagcctcggtagccgttcctcctgcccgctgggcctcccaacgggccctcctcccctccttgcaccggcccttcctggtctttgaataaagtctgagtgggcggca

SEQ ID NO: 481 - DNA, 297 bp, Homo sapiens
aaaaaaaggaaagtcaacaaaatttatgtaaggccagtacaccaaaaactacaaaaaattgctttgagaaattatgaaagaactaaattagtggggagataaaccttgtcatggatcaaaagagttgttatgtttaaagagtcagttcttcgtaaattgatctccagatccaatgcaattctaataaaaattccaagcggcattttggtagaaattttcaagctgattctaccatttatatggtaatgtcaatgatcaagaataataaaatagcaatattataaaagaataatggtg

SEQ ID NO: 482 - DNA, 298 bp, Homo sapiens
agaaaaaagaaagtcaacaaaatctatgtaaggccagtacaccaaaaactacaaaaaaattgctttgagaaattatgaaagaactaaattagtggggagataagccttgtcatggatcagaagagttgttatgtttaaaaagtcagttcttcatgaattgatctccagatccaatgcaattctagtaaaaattccaagcagcattttggtagaaatttacaagctgattctagcatttatatggtaatgtcaatgatcaagagtaataaaagagcaatattataaaagaataatggtg

SEQ ID NO: 483 - DNA, 372 bp, Homo sapiens
tggatttgccctccctgctgtcagaacaacaggattctggaagagtagaggacaggccgtgggacttggctgtctagagacaaggcgggagggatttccttgagaggcagggacatgtggtggttactaatcattgtgaggtgtctgggatgtaatggatgggaaatctactaagaagtcaacttatgtaataattagaaaagctctagttctgaggacagagacctgttggagtcaccatagtggaaatttatgacctggtatccagttcagatacctggagcttcttgactggggggagattggatcccttggggaagagtgaagccttcaatgctgccacaagtgtgatccgcccgcctcagcctccca

SEQ ID NO: 484 - DNA, 2405 bp, Homo sapiens
catccctctaccaccatttcattcttgtccccactccaaagtcttctccattttacttttattaattttctattgctgcatactaaattactgcaagctttagagggttacaataacaatgatttactttcttgcagtgtccacagatcagaagttcaggcctggattagctgggtcttcttctcagggcctcacaggctgaaactaggctgggtttctttctggagggtctggggaagaacttcctctcaagtttcctcaggttgtcagctgagttcagttccttgtgactgcaggactgagatctctgttttcttgctggctgtcagccaggggcctcttgctgctcctagaggcctcccacgttcccactgcatgctttctccatccagcagaggagaatcaccctgcctggaaaccctcctgcacttcacatttctccaggaagacctcagtccctccaaggaattcaccttctttaggtcaagctcataagataatctctctgtcttagattcgactgatttgggatctcgattacatctgctaacttttttgccataaattgtaacacaatcacaggagtgatatctcatcgctggctttgtctacactcaggaagaagtgattatataagagcaaagatcactgcagctcatcttaggattctgtctaccataatactataaagacacagtaattaaaagactataacagatttctacttctatctgttagaataagtcatatcagactgcctccataaacaaacataaaattgttttcagacagtggacaacaggcagtacaacaggaaacttaaggtggaagccccatgatttcctagtttttgtctggggagaatttctcagcagctgcacagtaggctagagtcctctcagagcagggcatccccactgagctgagaaggcagagatcagagttcaaggtcactgaagaaattccaatctgcagggcagggcaccaataggagacagctgttcagaggggcagctctcgaagtccatgtggggttccatgtgcatacttatcaaggaatggactgtacctgcacaagaaaaagactaacagatttaacataggagtggctgctataaagttgagtttggaccagaagtacttgtggtggaagagggttggggaatggatgatggagttcctgccatccagggtgggaagaactcatgcacacctcattagcatccaggtatccaattgagacactggaaaggctgtgctttaggaataagtgtcaccctttacaataaggcctattctagaccagccctagtaaaggctaaaacgaaaccctgacaccatccacaaaggggtggattggtgattgagtcctaccaaattagagagtcttgggaaatgctgttggctttccatgaatccactgtaataaaacataaaccaagtccacataagtccaatgtgatcagacagtaattttaatgcccactagaacaaaattaattcacacaatcaatgacacaagttagccaagtcgacatttaagcaaaatacatctaagaacagctaacaaataactcttctcaaactcacatagaacattcaccaagatagaccacatatgctgagacatacttagtattttctgtcctttctctttggctcatgcatactgtgctcaaactcttaaaattatacactttaattatacactttagtgattacacactttaatgcatctcaattgcatgtaagttatatttcaatatatttgttaaaagtttataattaaaaaaactgtcctagcttgattcaagaaatcttttttatatttaaaaagtataattttatatattatcagggcaaaagagaaaaactgtatgattgcctcatcatacacagtaaaagcatttggcaaaattgaaaacttttttcatgatttataaaaacaaaccccagaaaactctcagcatgataagaacggaaggcaacacttccaaccccattaagggcagatttgaaaaacccacaggtaacattatattaaatggcataagattgaatgcttttccattaaatcagagaaaaaagtagaatatctgttgttactctttcaattcagcattatactagagctctaaatcaatgcaataaagtaagaaaaataaataaaagtattgaaaaggttgaaaataaagaattgaagctgtctttattcacggataatgtctatatgtgttaacaatcctagaaatctacaaaaatctaccaaaactaattagtgagtttggtagtgttgcaaaatataagctcaatataagtagtcttttgtatttctgtatattagcagtgagcatttggaaaatgaaataaaaatacaatttcatttaaagtaacatctaaataca

SEQ ID NO: 485 - DNA, 747 bp, Homo sapiens
gcacatggtttcagtgagaaagccttgatccagcaacacaaactgcccaagcactgtgattaacttacaccctgggtgcaattggaccaaacaatgtagtcaaatgaaaattttgttccttcagatcgtgtttattccacatgccagaagttgtttaaagttctttaatcttgacccacagcttattcttccacagaataaccccaatacacataaaaaaccaattttcgcaaaacaaaagatagaagatgaacaacatctggcgatgtagaacccggaaggtccatgatcttattcaaagcatctggattctttggattcggggaaggtccacgttcagtatacccacataacactcctaacagggactggggcagggataagtggcatgtatgactactaacagaacagacaatacaaatggccttacctcacctctgctgccaaatgagttttggtgtccccattcctccagacaaaaaaaaaaaaaaaaatacccacaacttcttcttttacagcagtttctgtatgctggtattggggataaaaaggggccctgaattacatttatgaatgatagagggaaaccctggcccctttccctaggtcaccttgctagtttaagagccagtcagaatgtaaatctgatctaattaaaacgctcttgttctttattcctggctgtggcactggtgagagaaatcaaggtggaagttgaggaaaaaaaatcgagggggatctttagag

SEQ ID NO: 486 - DNA, 480 bp, Homo sapiens
  SITE (8): n equals a,t,g, or c
aacccggnaggtccatgatcttattcaaagcatctggattctttggattcggggaaggtccacgttcagtatacccacataacactcctaacagggactggggcagggataagtggcatgtatgactactaacagaacagacaatacaaatggccttacctcacctctgctgccaaatgagttttggtgtccccattcctccagacaaaaaaaaaaaaaaaaatacccacaacttcttcttttacagcagtttctgtatgctggtattggggataaaaaggggccctgaattacatttatgaatgatagagggaaaccctggcccctttccctaggtcaccttgctagtttaagagccagtcagaatgtaaatctgatctaattaaaacgctcttgttctttattcctggctgtggcactggtgagagaaatcaaggtggaagttgaggaaaaaaaatcaggacaacctttatagctaat

SEQ ID NO: 487 - DNA, 3541 bp, Homo sapiens
caaacaaggacatggctgtgaatcagacattgggccctgggctgtgtaatgtaagtaaatgcagcagaataattaaaaagcaaattcggatttagattttaacacttgaaaagagtgctttatgaccatgctaaagatgtgtttcttgcacacaggtatacaagttactagggaggcccccatttgaaactacaaatctcaaagaaacttataggtgcataagggaagcaaggtatacaatgccgtcctcattgctggctcctgccaagcacttaatgctagtatgttgtccaaaaacccagaggatcgtcccagttggatgacatcattcgacatgacttttttttgcaggtggtgcactatcttttttttttaattacctggtattgatcccagttacctgacaggttactgaaggctttttctaatattccacagggcttcactccggacagactgtcttctagctgtgtcatacagttccagatttccacttatcaagcccagctaagaatttctttaagaaagcagctgctgctcttttggtggcaaaaaagacaaagcaagatatattgacacacatagtaagttaacaagacttcttttcctttttcgtacccaatattatatttaaattggtaaattagttaaaagagaattttatattagcataactggccatatttgcgtattcttaaatgttgatatttatagcataataaatccataccttgaatgtgattgatagctttttattttccaaacactaaagagggctttgggggtagctgcagctaaaggcaaaggtaaaatgctatttttgcccaggatgctcataagttggtcaataatgcaagaaggagaaaatatgactaaccctgttcctacctgttaagatagactaatgtttgtaattctgtttctgatatacagatagagtgtctaaagaagatgaagacatctacaagcttaggcatgatttgaaaaagacttcaataactcagcaacccagcaaacacaggacagatgaggtgtgtgggaaagagtaaagtagatactcacgctttacgttatttccactctttattaattagcacttggactatgattatcatggttcaaatatgtcatatttacttaaagtttttcttcaaaccctttgaaagggaagttaaaactaaaaggaagtcttttagttttacagtgcatgcaagtgagtttactgcgttatcttttatctggcttgtgtccattgctttttgatgagctttcccagcaaattggcctcactctcatcttaatctggaattctcacccttaaatgaatttagatgcttgactcattgcataaatcttctctcttctaaggagctccagccacctaccaccacagttgccaggtctggaacacccgcagtagaaaacaagcagcagatggggatgctattcggatgatagtcagagggactcttggcagctgtagcagcagcagtgaatgtaagtggttgtcaatcgtattttaaataatgaaactcgaaatgccagtgctaaatacataataatttaagtcaatttactttgtagcttaatttaacatagaagtagtaagattacaggaattggaaaataatcttgagttctatgtctttcgaattaatggagtgaaacttagcatctaccaaagcctgaggttttattgctaaaatattgtataacttgaaacatttctgtctgacttttcaggccttgaagacagtaccatgggaagtgttgcagacacagtggcaagggttcttcggggatgtctggaaaacatgccggaagctgattgcattcccaaagagcagctgagcacatcatttcagtgggtcaccaaatgggttgattactctaacaaatatggctttgggtaccagctctcagaccacaccgtcggtgtccttttcaacaatggtgctcacatgagcctccttccagacaaaaagtaagtgtatcaattaatgaaatcctgtcagttctctagtcttgcactaaagaaatctaaaaacaatgattaactgcttctatttttttttcctcttctctccctttcgttcctgtttttatagaacagttcactattacgcagagcttggccaatgctcagttttcccagcaacagatgctcctgagcaatttattagtcaagtgacggtgctgaaatacttttctcattacatggaggagaacctcatggatgtaagtactgtggctttagagtggtgacatttgaagtgtaggccacaaagcagtagtgtctgcatcactttgaagcttgttagaaacagattctcctgacctaccgttggtgtactgaatcagaatctccgggaggtggaggcagggatttccaaagccattctgatgcttgcttaagtttgagaggattttcttagaataataatagagtgcatgctacaaaatctttgtaggcactaactcactctcctaatctcttccagggtggagatctgcctagtgttactgatattcgaagacctcggctctacctccttcagtggctaaaatctgataaggccctaatgatgctctttaatgatggcacctttcaggtaaatgaactcttcaggaaagtgcacgtttaggtcctaaacagaaagatttgtacctagacagtttagtgattgactgaacttttctaattctcgaatattttgagagatctaatgtctatgtttattttttaaggtgaatttctaccatgatcatacaaaatcatcatctgtagccaaaatgaagaataccttctcacctacatcaatgaggataggatatctacaactttcaggctgacaactctgctgatgtctggctgttcatcagaattaaaaaatcgaatggaatatgccctgaacatgctcttacaaagatgtaactgaaagacttttcgaatggaccctatgggactcctcttttccactgtgagatctacagggaagccaaaagaatgatctagagtatgttgaagaagatggacatgtggtggtacgaaaacaattcccctgtggcctgctggactgggtggaaccagaacaggctaaggcatacagttcttgactttggacaatccaagagtgaaccagaatgcagttttccttgagatacctgttttaaaaggtttttcagacaattttgcagaaaggtgcattgattcttaaattctctctgttgagagcatttcagccagaggactttggaactgtgaatatacttcctgaaggggagggagaagggaggaagctcccatgttgtttaaaggctgtaattggagcagcttttggctgcgtaactgtgaactatggccatatataattttttttcattaatttttgaagatacttgtggctggaaaagtgcattccttgttaataaactttttatttattacagcccaagagcagtatttattatcaaatgtctttttttttatgttgaccattttaaaccgttggcaataaagagtatgaaaacgcagaaataa

SEQ ID NO: 488 - DNA, 1055 bp, Homo sapiens
aatctcttccagggtggagatctgcctagtgttactgatattcgaagacctcggctctacctccttcagtggctaaaatctgataaggccctaatgatgctctttaatgatggcacctttcaggtaaatgaactcttcaggaaagtgcacgtttaggtcctaaacagaaagatttgtacctagacagtttagtgattgactgaacttttctaattctcgaatattttgagagatctaatgtctatgtttattttttaaggtgaatttctaccatgatcatacaaaaatcatcatctgtagccaaaatgaagaataccttctcacctacatcaatgaggataggatatctacaactttcaggctgacaactctgctgatgtctggctgttcatcagaattaaaaaatcgaatggaatatgccctgaacatgctcttacaaagatgtaactgaaagacttttcgaatggaccctatgggactcctcttttccactgtgagatctacagggaacccaaaagaatgatctagagtatgttgaagaagatggacatgtggtggtacgaaaacaattcccctgtggcctgctggactgggtggaaccagaacaggctaaggcatacagttcttgactttggacaatccaagagtgaaccagaatgcagttttccttgagatacctgttttaaaaggtttttcagacaattttgcagaaaggtgcattgattcttaaattctctctgttgagagcatttcagccagaggactttggaactgtgaatatacttcctgaaggggagggagaagggaggaagctcccatgttgtttaaaggctgtaattggagcagcttttggctgcgtaactgtgaactatggccatatataattttttttcattaatttttgaagatacttgtggctggaaaagtgcattccttgttaataaactttttatttattacagcccaaagagcagtatttattatcaaaatgtctttttttttatgttgaccattttaaaccgttggcaataaagagtatgaaaacgcagaaataa

SEQ ID NO: 489 - DNA, 6282 bp, Homo sapiens
gcgcgcggctccgctgggaagcgagacccgggtggcgggacaagacttgcttcccggccacgcgcgctcggccggccgtggggcggggcataggccgtgacgtgatgtcgcgtatcgagtctccgcccccttcccgcctccccgtatataagacttcgccgagcgctctcactcgcacaagtggaccggggtgttgggtgctagtcggcaccagaggcaagggtgcgaggaccacggccggctcggacgtgtgaccgcgcctagggggtggcagcgggcagtgcggggcggcaaggcgaccatggagcttttgcggactatcacctaccagccagccgccagcaccaaaatgtgcgagcaggcgctgggcaagggttgcggagcggactcgaagaagaagcggccgccgcagccccccgaggaatcgcagccacctcagtcccaggcgcaagtgcccccggcggcccctcaccaccatcaccaccattcgcactcggggccggagatctcgcggattatcgtcgaccccacgactgggaagcgctactgccggggcaaagtgctgggaaaggtgacaagcggagggcgccgggctgccgggcgggcgggaggtctgtccgggcgaccccaagccgggcaagcccgcggggtccctcgcccgccgcttccgggtttttcgggggtccgatcccagcgcgaggtgggctcctcacctgccctctggcttttgtgcgccggcagcgctggggatcgggctttgcattcttagcctcagaactgtgtgtctcccgcagcccagagaaatgcatcttgagtctggaagcgagggctttctacatcagacctctctccctctatctgctcccagggaattttcctgacaagtctcatcagagattatttttcatgtctccccgttccaactccctccataaagctcccctttataaaagaagaagagaaactgtttgaacttgctgtttccagcaatgcatttctcttcatgagggagctttaacgaagtcgaatgcctccctctgtccaccctcctccattcctcaatttttttttttttgcttttctttcttcccatttatttatttatttaaaatatctgccgtccatttttgtgccatcctcaattccgtctcggctttgtttcctttcagggtggctttgcaaaatgttacgagatgacagatttgacaaataacaaagtctacgccgcaaaaattattcctcacagcagagtagctaaacctcatcaaagggaaaaggtgcgtatgactcttgagtaaagtattttctttgtgtgcaaggatggcccttccctgttaggaaaatgtcttctgcatgtgtaatcactggcttttccgaggtgactggaagctaataagccttaccttgctttttcatttagattgacaaagaaatagagcttcacagaattcttcatcataagcatgtagtgcagttttaccactacttcgaggacaaagaaaacatttacattctcttggaatactgcagtagaagggtaagtgtcaactcctatttgagaacatttgcttaccccgaattaacatggtattcaaagagtattttatctgggattttagctgtggcagcacttacactgcaaagttaactttcattgctcatcctgcaaagggaaaccagtgattttgataactgttttgacagattctcttttttccttctcctcttcttagtcaatggctcatattttgaaagcaagaaaggtgttgacagagccagaagttcgatactacctcaggcagattgtgtctggactgaaataccttcatgaacaagaaatcttgcacagagatctcaaactaggtaagtcattgacgccaaaagctgagttttgtgttagagttcttttttctctctctgtttttttttacatattaatgttcttaattgggatctcgtgtctgcaatcttgcttttgaatgggcgactttcatataacaattggctgcctggctccaaagtggatgtgtgtgtacttggttagaacgcattttcaaagggattcacattttgttttgtttatcgtctagggaacttttttattaatgaagccatggaactaaaagttggggacttcggtctggcagccaggctagaacccttggaacacagaaggaggtaagagtcagaaagatgcatcctagtagacttttgtggagaccaaatatgccttcattattttgcatttaatgtttcagaggtccggtaataaaatctataaatcatagcaatgttaatttaaagaaatacttattaaatgcccactatggactagacagagcaccctgtgcctctaaattgattatgaaagcagtcaatgaagtcttttcttggcttaaaatgtataaaatgccacgacgtccctggctttagttggttaacaacactttgcatgtgggctaaaacaacgtgtgtgcatttttaaaaattaccaaaactcatttggtcagatctcaattgaattttcagatgccaaaagtcaaatgtttccaaatagaaattcagtatagattttaagattttgtttaagattttgtctcccatcaagtcatgtcaagagaaccaagtttaagtagtggaatagttcctaacacgatctcaatattttgtctttccagaacgatatgtggtaccccaaattatctctctcctgaagtcctcaacaaacaaggacatggctgtgaatcagacatttgggccctgggctgtgtaatgtaagtaaatgcagcagaataattaaaaagcaaattcggatttagattttaacacttgaaaagagttgctttatgaccattgctaaagatgtgtttctttgcacacaggtatacaatgttactagggaggcccccatttgaaactacaaatctcaaagaaacttataggtgcataagggaagcaaggtatacaatgccgtcctcattgctggctcctgccaagcacttaattgctagtatgttgtccaaaaacccagaggatcgtcccagtttggatgacatcattcgacatgacttttttttgcaggttggtgcactatcttttttttttaattacctggtattgatcccagttacctgacaggttactgaaggctttttctaatattccacagggcttcactccggacagactgtcttctagctgttgtcatacagttccagatttccacttatcaagcccagctaagaatttctttaagaaagcagctgctgctctttttggtggcaaaaaagacaaagcaagatatattgacacacatagtaagttaacaagacttcttttcctttttcgtacccaatattatatttaaatttggtaaattagttaaaagagaattttatattagcataacttggccatatttgcgtattcttaaatgttgatatttatagcataataaatccataccttgaattgtgattgatagctttttattttgcaaacactaaagagggcttttgggggtagctgcagctaaaggcaaaggtaaaatgctatttttgcccaggatgctcataagttggtcaataatgcaagaaggagaaaatatgactaaccctgttcctaccttgttaagatagactaatgtttgtaattctgtttcttgatatacagatagagtgtctaaagaagatgaagacatctacaagcttaggcatgatttgaaaaagacttcaataactcagcaacccagcaaacacaggacagatgaggtgtgttgggaaagagtaaagtagatactcacgctttacgttatttccactctttattaattagcacttggactatgattatcatggttcaaatatgtcatatttacttaaagtttttcttcaaaccctttgaaagggaagttaaaactaaaaggaagtcttttagttttacagtgcatgcaagtgagtttactgcgtatcttttatctggcttgtgtccattgcttttgatgagctttcccagcaattgcctcactctcatcttaatctggaattctcacccttaaatgaatttagatgcttgactcattgcataaatcttctctcttctaaggagctccagccacctaccaccacagttgccaggtctggaacacccgcagtagaaaacaagcagcagattggggatgctattcggatgatagtcagagggactcttggcagctgtagcagcagcagtgaatgtaagtggttgtcaatcgtattttaaataatgaaactcgaaatgccagtgctaaatacataataatttaagtcaatttactttgtagcttaatttaacatagaagtagtaagattacaggaattggaaaataatcttgagttctatgtctttcgaattaatggagtgaaacttagcatctaccaaagcctgaggttttattgctaaaatattgtataacttgaaacatttctgtctgacttttcaggccttgaagacagtaccatgggaagtgttgcagacacagtggcaagggttcttcggggatgtctggaaaacatgccggaagctgattgcattcccaaagagcagctgagcacatcatttcagtgggtcaccaaatgggttgattactctaacaaatatggctttgggtaccagctctcagaccacaccgtcggtgtccttttcaacaatggtgctcacatgagcctccttccagacaaaaagtaagtgtatcaattaatgaaatcctgtcagttctctagtcttgcactaaagaaatctaaaaacaatgattaactgcttctatttttttttcctcttctctccctttcgttcctgtttttatagaacagttcactattacgcagagcttggccaatgctcagttttcccagcaacagatgctcctgagcaatttattagtcaagtgacggtgctgaaatacttttctcattacatggaggagaacctcatggatgtaagtactgtggctttagagtggtgacatttgaagtgtaggccacaaagcagtagtgtctgcatcactttgaagcttgttagaaacagattctcctgacctaccgttggtgtactgaatcagaatctccgggaggtggaggcagggatttccaaagccattctgatgcttgcttaagtttgagaggattttcttagaataataatagagtgcatgctacaaaatctttgtaggcactaactcactctcctaatctcttccagggtggagatctgcctagtgttactgatattcgaagacctcggctctacctccttcagtggctaaaatctgataaggccctaatgatgctctttaatgatggcacctttcaggtaaatgaactcttcaggaaagtgcacgtttaggtcctaaacagaaagatttgtacctagacagtttagtgattgactgaacttttctaattctcgaatattttgagagatctaatgtctatgtttattttttaaggtgaatttctaccatgatcatacaaaaatcatcatctgtagccaaaatgaagaataccttctcacctacatcaatgaggataggatatctacaactttcaggctgacaactctgctgatgtctggctgttcatcagaattaaaaaatcgaatggaatatgccctgaacatgctcttacaaagatgtaactgaaagacttttcgaatggaccctatgggactcctcttttccactgtgagatctacagggaagccaaaagaatgatctagagtatgttgaagaagatggacatgtggtggtacgaaaacaattcccctgtggcctgctggactggttggaaccagaacaggctaaggcatacagttcttgactttggacaatccaagagtgaaccagaatgcagttttccttgagatacctgttttaaaaggtttttcagacaattttgcagaaaggtgcattgattcttaaattctctctgttgagagcatttcagccagaggactttggaactgtgaatatacttcctgaaggggagggagaagggaggaagctcccatgttgtttaaaggctgtaattggagcagcttttggctgcgtaactgtgaactatggccatatataattttttttcattaatttttgaagatatcttgtggctggaaaagtgcattccttgttaataaactttttatttattacagcccaaagagcagtatttattatcaaaatgtctttttttttatgttgaccattttaaaccgttggcaataaagagtatgaaaacgcagaaataa

SEQ ID NO: 490 - DNA, 6286 bp, Homo sapiens
gcgcgcggctccgctgggaagcgagacccgggtggcgggacaagacttgcttcccggccacgcgcgctcggccggccgtggggcggggcataggccgtgacgtgatgtcgcgtatcgagtctccgcccccttcccgcctccccgtatataagacttcgccgagcgctctcactcgcacaagtggaccggggtgttgggtgctagtcggcaccagaggcaagggtgcgaggaccacggccggctcggacgtgtgaccgcgcctagggggtggcagcgggcagtgcggggcggcaaggcgaccatggagcttttgcggactatcacctaccagccagccgccagcaccaaaatgtgcgagcaggcgctgggcaagggttgcggagcggactcgaagaagaagcggccgccgcagccccccgaggaatcgcagccacctcagtcccaggcgcaagtgcccccggcggcccctcaccaccatcaccaccattcgcactcggggccggagatctcgcggattatcgtcgaccccacgactgggaagcgctactgccggggcaaagtgctgggaaaggtgacaagcggagggcgccgggctgccgggcgggcgggaggtctgtccgggcgaccccaagccgggcaagcccgcggggtccctcgcccgccgcttccgggtttttcgggggtccgatcccagcgcgaggtgggctcctcacctgccctctggcttttgtgcgccggcagcgctggggatcggctttgcattcttagcctcagaactgtgtgtctcccgcagcccagagaaatgcatcttgagtctggaagcgagggctttctacatcagacctctctccctctatctgctcccagggaattttcctgacaagtctcatcagagattatttttcatgtctccccgttccaactccctccataaagctcccctttataaaagaagaagagaaactgtttgaacttgctgtttccagcaatgcatttctcttcatgagggagctttaagcgaagtcgaatgcctccctctgtccaccctcctccattcctcaatttttttttttttgcttttctttcttcccatttatttatttatttaaaatatctgccgtccatttttgtgccatcctcaattccgtctcggctttgtttcctttcagggtggctttgcaaaatgttacgagatgacagatttgacaaataacaaagtctacgccgcaaaaattattcctcacagcagagtagctaaacctcatcaaagggaaaaggtgcgtatgactcttgagtaaagtattttctttgtgtgcaaggatggcccttccctgttaggaaaatgtcttctgcatgtgtaatcactggcttttccgaggtgactggaagctaataagccttaccttgctttttcatttagattgacaaagaaatagagcttcacagaattcttcatcataagcatgtagtgcagttttaccactacttcgaggacaaagaaaacatttacattctcttggaatactgcagtagaagggtaagtgtcaactcctatttgagaacatttgcttaccccgaattaacatggtattcaaagagtattttatctgggattttagctgtggcagcacttacactgcaaagttaactttcattgctcatcctgcaaagggaaaccagtgattttgataactgttttgacagattctcttttttccttctcctcttcttagtcaatggctcatattttgaaagcaagaaaggtgttgacagagccagaagttcgatactacctcaggcagattgtgtctggactgaaataccttcatgaacaagaaatcttgcacagagatctcaaactaggtaagtcattgacgccaaaagctgagttttgtgttagagttcttttttctctctctgtttttttttacatattaatgttcttaattgggatctcgtgtctgcaatcttgcttttgaatgggcgactttcatataacaattggctgcctggctccaaagtggatgtgtgtgtacttggttagaacgcattttcaaagggattcacattttgttttgtttatcgtctagggaacttttttattaatgaagccatggaactaaaagttggggacttcggtctggcagccaggctagaacccttggaacacagaaggaggtaagagtcagaaagatgcatcctagtagacttttgtggagaccaaatatgccttcattattttgcatttaatgtttcagaggtccggtaataaaatctataaatcatagcaatgttaatttaaagaaatacttattaaatgcccactatggactagacagagcaccctgtgcctctaaattgattatgaaagcagtcaatgaagtcttttcttggcttaaaatgtataaaatgccacgacgtccctggctttagttggttaacaacactttgcatgtgggctaaaacaacgtgtgtgcatttttaaaaattaccaaaactcatttggtcagatctcaattgaattttcagatgccaaaagtcaaatgtttccaaatagaaattcagtatagattttaagattttgtttaagattttgtctcccatcaagtcatgtcaagagaaccaagtttaagtagtggaatagttcctaacacgatctcaatattttgtctttccagaacgatatgtggtaccccaaattatctctctcctgaagtcctcaacaaacaaggacatggctgtgaatcagacatttgggccctgggctgtgtaatgtaagtaaatgcagcagaataattaaaaagcaaattcggatttagattttaacacttgaaaagagttgctttatgaccattgctaaagatgtgtttctttgcacacaggtatacaatgttactagggaggcccccatttgaaactacaaatctcaaagaaacttataggtgcataagggaagcaaggtatacaatgccgtcctcattgctggctcctgccaagcacttaattgctagtatgttgtccaaaaacccagaggatcgtcccagtttggatgacatcattcgacatgacttttttttgcaggttggtgcactatcttttttttttaattacctggtattgatcccagttacctgacaggttactgaaggctttttctaatattccacagggcttcactccggacagactgtcttctagctgttgtcatacagttccagatttccacttatcaagcccagctaagaatttctttaagaaagcagctgctgctctttttggtggcaaaaaagacaaagcaagatatattgacacacatagtaagttaacaagacttcttttcctttttcgtacccaatattatatttaaatttggtaaattagttaaaagagaattttatattagcataacttggccatatttgcgtattcttaaatgttgatatttatagcataataaatccataccttgaattgtgattgatagctttttattttgcaaacactaaagagggcttttgggggtagctgcagctaaaggcaaaggtaaaatgctatttttgcccaggatgctcataagttggtcaataatgcaagaaggagaaaatatgactaaccctgttcctaccttgttaagatagactaatgtttgtaattctgtttcttgatatacagatagagtgtctaaagaagatgaagacatctacaagcttaggcatgatttgaaaaagacttcaataactcagcaacccagcaaacacaggacagatgaggtgtgttgggaaagagtaaagtagatactcacgctttacgttatttccactctttattaattagcacttggactatgattatcatggttcaaatatgtcatatttacttaaagtttttcttcaaaccctttgaaagggaagttaaaactaaaaggaagtcttttagttttacagtgcatgcaagtgagtttactgcgttatcttttatctggcttgtgtccattgctttttgatgagctttcccagcaattgcctcactctcatcttaatctggaattctcacccttaaatgaatttagatgcttgactcattgcataaatcttctctcttctaaggagctccagccacctaccaccacagttgccaggtctggaacacccgcagtagaaaacaagcagcagattggggatgctattcggatgatagtcagagggactcttggcagctgtagcagcagcagtgaatgtaagtggttgtcaatcgtattttaaataatgaaactcgaaatgccagtgctaaatacataataatttaagtcaatttactttgtagcttaatttaacatagaagtagtaagattacaggaattggaaaataatcttgagttctatgtctttcgaattaatggagtgaaacttagcatctaccaaagcctgaggttttattgctaaaatattgtataacttgaaacatttctgtctgacttttcaggccttgaagacagtaccatgggaagtgttgcagacacagtggcaagggttcttcggggatgtctggaaaacatgccggaagctgattgcattcccaaagagcagctgagcacatcatttcagtgggtcaccaaatgggttgattactctaacaaatatggctttgggtaccagctctcagaccacaccgtcggtgtccttttcaacaatggtgctcacatgagcctccttccagacaaaaagtaagtgtatcaattaatgaaatcctgtcagttctctagtcttgcactaaagaaatctaaaaacaatgattaactgcttctatttttttttcctcttctctccctttcgttcctgtttttatagaacagttcactattacgcagagcttggccaatgctcagttttcccagcaacagatgctcctgagcaatttattagtcaagtgacggtgctgaaatacttttctcattacatggaggagaacctcatggatgtaagtactgtggctttagagtggtgacatttgaagtgtaggccacaaagcagtagtgtctgcatcactttgaagcttgttagaaacagattctcctgacctaccgttggtgtactgaatcagaatctccgggaggtggaggcagggatttccaaagccattctgatgcttgcttaagtttgagaggattttcttagaataataatagagtgcatgctacaaaatctttgtaggcactaactcactctcctaatctcttccagggtggagatctgcctagtgttactgatattcgaagacctcggctctacctccttcagtggctaaaatctgataaggccctaatgatgctctttaatgatggcacctttcaggtaaatgaactcttcaggaaagtgcacgtttaggtcctaaacagaaagatttgtacctagacagtttagtgattgactgaacttttctaattctcgaatattttgagagatctaatgtctatgtttattttttaaggtgaatttctaccatgatcatacaaaaatcatcatctgtagccaaaatgaagaataccttctcacctacatcaatgaggataggatatctacaactttcaggctgacaactctgctgatgtctggctgttcatcagaattaaaaaatcgaatggaatatgccctgaacatgctcttacaaagatgtaactgaaagacttttcgaatggaccctatgggactcctcttttccactgtgagatctacagggaagccaaaagaatgatctagagtatgttgaagaagatggacatgtggtggtacgaaaacaattcccctgtggcctgctggactggttggaaccagaacaggctaaggcatacagttcttgactttggacaatccaagagtgaaccagaatgcagttttccttgagatacctgttttaaaaggtttttcagacaattttgcagaaaggtgcattgattcttaaattctctctgttgagagcatttcagccagaggactttggaactgtgaatatacttcctgaaggggagggagaagggaggaagctcccatgttgtttaaaggctgtaattggagcagcttttggctgcgtaactgtgaactatggccatatataattttttttcattaatttttgaagatacttgtggctggaaaagtgcattccttgttaataaactttttatttattacagcccaaagagcagtatttattatcaaaatgtctttttttttatgttgaccattttaaaccgttggcaataacagagtatgaaaacgcagacaataat

SEQ ID NO: 491 - DNA, 225 bp, Homo sapiens
gaggaggcctcgcctgcccgtgcggcgggctccgggcaccctgataccttgacacaggaggccccgggcggccgggaagggctgtgcgggggagggactgcgtctacacccgcgcccgactcgctcgggtcacggcactgccctgccaccaggcggctggggcgggggtgaggccaggcgtcggccctcgcgattctgttttgtacgctgaggctcggagccttc

SEQ ID NO: 492 - DNA, 225 bp, Homo sapiens; identical to SEQ ID NO: 491

SEQ ID NO: 493 - DNA, 1235 bp, Homo sapiens
tgtcacaggctttctttacagatgcggtgtaaatgaaattgttaacggggttcaaaatcagatggctaaatgtgttaatattctcatttaaacccaactacctttcttcgtctccaagcccctataatttaactctgaactataatcttttccattctatctagctcccatcctaagtcctctcctcctaacgtggaactctcctaaaatcttctccttatactagggttcgagacatgaggctgtctttttgggccttttgcgttgtcacagtcccagaccacggaacattctctcttccccaggacaggacattctctcttccccagcctccttcctgtcctggcgttgagtcttccaaatggaaaattccagccatatcaattggtgatgcacccatttcttcctgtggaacgacagtctgatggaattgcttctggagtaaatgcccagcttcttaccacttcagtgtcagcctgaatgtttggaaagttctagcacctcaaaccatttgcatctatgaaagcagaactctattttttccctttggtttagcttgtgagttctctgtgggaggaagatctgatatggccggctctctttcaaccctagttccagcagagagagagagagaatgttctgggtgacggaccctcccagcaaaggggcttgctttatttgcttctctccccaaccctccactcttagcctttgtcttttgaataatccttcctcattccacttttgtggtgggggataattagtcacaactcagtagtaagccgtgcctgctgtagagaggaagcattcagggggttggaagtgtggagaccccagtctgattgctggaatcagtgctcctcggttcagtgttttgagaccaggtctttagcttctagctgggcatatttttctgctttgtaatttaacctgtatcttttttttcccatgttcctgcctcatcagggaattgtaagatttagggggaggtgtgggaaatcttactctttgccctaaagtattcagcgatcagaattctggataccctgcaaaacacctccaacctccctgcctttgaaccctgtgttaacaatgagaagcttgtttatttgaaggctgggttctcattggcccacaggggtaggttgtaattgtgtgtctaaaaaattgccttttgcattccccaatagcatgacaactggaatagtaatttgacttaaaaaaaaaaagaacaa

SEQ ID NO: 494 - DNA, 508 bp, Homo sapiens
ttcagcttggctgaagaggaaataaaaacagaacaggaggtggtagagggcatggatatctctactcgctccaaaggtgagtaaaaatcttgtattatctattctagagctaaggaggaaattggaatttctttttgttgttgtagtgcagtgaagtgtgtggctctctgagccgacgttgtaactcttcttggattttcagatataagattttttgatggatgaacctaattgatggagaactctcctccttttggttttctttccctggtgcctgtgtaggggtcctgacagtgaattttacctgtgtgtcatgactgagggtggctggctacctctccgcagggtgactttcaggagccacagtttaaataaagcatgttctggaagccaccagagcctctagctgctgctcgttttctgattttaacaacagacctctttggaatcccagaagtgggatgaagtcagcccgcttcactggaaagtggtggtcttgggttagaga

SEQ ID NO: 495 - DNA, 648 bp, Homo sapiens
gataaaacagcttaacttttttttccctctctcttctgctccagcattgattatcttaaaactcagaagcaaatagccaccacataactagtttgcattttcctcgtctctcagcagcattcctgcctgaagtattcagctcctctaggctgttacaagccaaataatggttcccttgaatgcagccttcctccatgatcaatacacctttgaatgttttcatcgctgcagaaatccttcaagtgggttttttttggctcagttctgcataattgtttccctcaccactgtagatttcagttggatcacagattagcgttttctctattactcaaaatatgggatcggtttcaagaagtttagaatttcacatacttcatgctagagagggaaacagaattctagttgctagaaaagatcaaggttgctatttgttcctttgaagttaactgtctacccatctccgagggctgcatggggctttttgttaagatgtatttccagtcaccccaagccagaacccatcaacagcatccagttggacaacctgtgtatgtttcaggcagagtgtttctgagttgagaatgttttctccttaagttggaatagaaagcattagtgctgaaataaccttcaataaatcaccgt

SEQ ID NO: 496 - DNA, 4454 bp, Homo sapiens
  SITE (3527): n equals a,t,g, or c
gggctgcttgcgccaggcgccggccgccccactgcgggtccctggcggccggtgtctgaggagtcggagagccgaggcggccagaccgtgcgccccgcgcttctcccgaggccgttccgggtctgaactgtaacagggaggggcctcgcaggagcagcagcgggcgagttaaaggtgtgtacgtagtttttctaaataggacagcgctttgcaaattggctgtcatggacttgctgttttgacagagaatgagcactgagagcgaagaaacccggcataaataaatccggctttcatagggatctgccgggcactgaggctggacgcgcccttcgacaggcgcaccgggcgcccggcgcgatgagacggtgcgggggctggaggccggagccgccccagagggtggtttcctcccaggtccctccttcctcaggggactcgctgtggacccgggaggaaagggggctcgaccagggatcccgcgtgcccgatcgcccgcccagcccgctcccctggcccgcccaggagtgcggggcgccgcggcggtggggcggacggcaggcgctgaggggcaggtgcggagcgccggctgcggctacctctcacctaggtgtgagctgattattcaaatgggctgccccgggtctggggaatggaggcccgcgccagcgcgccgcgctatatcaccagcctcccacgtcactgcggcacttgtccgctccgcggtccacacctgctcctcctcctcctcctcctcctcctcctcctcctcctccaccaccaccaccgcctcctcctcctccttcctcctcctcctccccacccccccactagcccccgcgccgcgcgcttcccgccgcctcggggcagctcggcactgccaacctcagccgccacccggcagcccgtgagcgcggcggcggcgggtgctccctaccgcggggcgctggcctgggcctcctccgctcctcgcccccccccacctcccgcccacttccaactaccgcctccggcctgcccagggagagagagggagtggagcccagggagagggagcgcgagagagggagggaggaggggacggtgctttggctgacttttttttaaaagagggtgggggtggggggtgattgctggtcgtttgttgtggctgttaaattttaggactgtccatgcactcggcttccagtatgctgggagcggtgaagatggaagggcacgagccgtccgactggagcagctactatgcagagcccgaggtaagcgctcgtcttttccagggggaagtggagcggcggcgctcgctccttccccaacctcaggaccgcttccctcgctggcacccccccaccccgccccacaaccccagcctttctgggcagccgccttttccgccctccttggaatcaaatgggtctcttttttatacgacacactgttagccttgagataatattaactttgtgatcaaatattgacttgcggcgcctccaaatcctcttcgtggccgagccacgcactatcctaacagagttatgtttggcagcgcgcggctggggaggggtgggaggtcggccggcgagggggtggggagctgaggaggagaagatgggtaggagttgggggctgaagtggaggcagagtcaaagactagtggacaaagagaaagaaagtttttgcctgcaaagctcagccgcgtgtggttcaggtctcggttctttccctattgccccgttcagtgcctccagccgcccctgcactccgcacaggcactgccttgcagtttccctgggacaagggagggggtccctggagggagaccggacagagggggcccgggacagtcttcgctggaggcagcccgaggcgccccgcgcgttgtcccgcaggttgcttgctgcgaccggaggtggcgtccggggacttcgggcctcggcgccagctcagtatgctggtgggagagtttggggagactctggggtaggggaatgtatttggggtgctggcttgggagtactccatgggacccctgttctagaatctgggcgaggtggagaagggctagtaacgggccacatgcccaagcagcaatccgctcgccaccttcccaagggcgatcgatcatgactctccctgaatgataacagactcggagtccggagactgggccatcgggtacgaaagggctccccggaggcctccccggacgcggaggcctgggcggtgggtgggaggtctgggcaccctccagccgcggtgctaacgctgtcgcctccctcccggggctctgccgcagggctactcctccgtgagcaacatgaacgccggcctggggatgaacggcatgaacacgtacatgagcatgtcggcggccgccatgggcagcggctcgggcaacatgagcgcgggctccatgaacatgtcgtcgtacgtgggcgctggcatgagcccgtccctggcggggatgtcccccggcgcgggcgccatggcgggcatgggcggctcggccggggcggccggcgtggcgggcatggggccgcacttgagtcccagcctgagcccgctcggggggcaggcggccggggccatgggcggcctggccccctacgccaacatgaactccatgagccccatgtacgggcaggcgggcctgagccgcgcccgcgaccccaagacctacaggcgcagctacacgcacgcaaagccgccctactcgtacatctcgctcatcaccatggccatccagcagagccccaacaagatgctgacgctgagcgagatctaccagtggatcatggacctcttccccttctaccggcagaaccagcagcgctggcagaactccatccgccactcgctctccttcaacgactgtttcctgaaggtgccccgctcgcccgacaagcccggcaagggctccttctggaccctgcaccctgactcgggcaacatgttcgagaacggctgctacctgcgccgccagaagcgcttcaagtgcgagaagcagctggcgctgaaggaggccgcaggcgccgccggcagcggcaagaaggcggccgccggggcccaggcctcacaggctcaactcggggaggccgccgggccggcctccgagactccggcgggcaccgagtcgcctcactcgagcgcctccccgtgccaggagcacaagcgagggggcctgggagagctgaaggggacgccggctgcggcgctgagccccccagagccggcgccctctcccgggcagcagcagcaggccgcgggccacctgctgggcccgacccaccacccgggcctgacgcctgaggcccacctgaagccggaacaccactacgccttcaaccacccgttctccatcaacaacctcatgtcctcggagcagcagcaccaccacagccaccaccaccaccagccccacaaaatggacctcaaggcctacgaacaggtgatgcactaccccggctacggttcccccatgcctggcagcttggccatgggcccggtcacgaacaaaacgggcctgnacgcctcgcccctggccgcagatacctcctactaccagggggtgtactcccggcccattatgaactcctcttaagaagacgacggcttcaggcccggctaactctggcaccccggatcgaggataagtgagagagcaagtgggggtcgagactttggggagacggtgttgcagacacgcaagggagaagaaatccataacacccccaccccaacacccccaagacagcagtcttcttcacccgctgcagccgttccgtcccaaacagagggccacacagataccccacgttctatataaggaggaaaacgggaaagaatataaagttaaaaaaaagcctccggtttccactactgtgtagactcctgcttcttcaagcacctgcagattctgatttttttgttgttgttgttctcctccattgctgttgttgcagggaagtcttacttaaaaaaaaaaaaaaacttttgtgagtgactcggtgtaaaaccatgtagttttaacagaaccagagggttgtactattgtttaaaaacaggaaaaaaaataatgtaagggtctgttgtaaatgaccaagaaaaagaaaaaaaaaagcattcccaatcttgacacggtgaaatccaggtctcgggtccgattaatttatggtttctgcgtgctttatttatggcttataaatgtgtattctggctgcaagggccagagttccacaaatctatattaaagtgttatacccggttttatcccttgaatcttttcttccagatttttcttttctttacttggcttacaaaatatacaggcttggaaattatttcaagaaggagggagggataccctgtctggttgcaggttgtattttattttggcccagggagtgttgctgttttcccaacattttattaataaaattttcagacataccaaa

SEQ ID NO: 497 - DNA, 4450 bp, Homo sapiens
gggctgcttgcgccaggcgccggccgccccactgcgggtccctggcggccggtgtctgaggagtcggagagccgaggcggccagaccgtgcgccccgcgcttctcccgaggccgttccgggtctgaactgtaacagggaggggcctcgcaggagcagcagcgggcgagttaaaggtgtgtacgtagtttttctaaataggacagcgctttgcaaattggctgtcatggacttgctgttttgacagagaatgagcactgagagcgaagaaacccggcataaataaatccggctttcatagggatctgccgggcactgaggctggacgcgccctccgacaggcgcaccgggcgcccggcgcgatgagacggggcgggggctggaggccggagccgccccagagggtggtttcctcccaggtccctccttcctcaggggactcgctgtggacccgggaggaaagggggctcgaccagggatcccgcgtgcccgatcgcccgcccagcccgctcccctggcccgcccaggagtgcggggcgccgcggcggtggggcggacggcaggcgctgaggggcaggtgcggagcgccggctgcggctacctctcacctaggtgtgagctgattattcaaatgggctgccccgggtctggggattggaggcccgcgccagcgcgccgcgctatatcaccagcctcccacgtcactgcggcacttgtccgctccgcggtccacacctcctcctcctcctcctcctcctcctcctcctcctcctcctccaccaccaccaccgcctcctcctcctccttcctcctcctcctccccacccccccactagcccccgcgccgcgcgcttcccgccgcctcggggcagctcggcactgccaacctcagccgccacccggcagcccgtgagcgcggcggcggcgggtgctccctaccgcggggcgctggcctgggcctcctccgctcctcgcccccccccacctcccgcccacttccaactaccgcctccggcctgcccagggagagagagggagtggagcccagggagagggagcgcgagagagggagggaggaggggacggtgctttggctgacttttttttaaaagagggtgggggtggggggtgattgctggtcgtttgttgtggctgttaaattttaaactgccatgcactcggcttccagtatgctgggagcggtgaagatggaagggcacgagccgtccgactggagcagctactatgcagagcccgaggtaagcgctcgtcttttccagggggaagtggagcggcggcgctcgctccttccccaacctcaggaccgcttccctcgctggcacccccccaccccgccccacaaccccagcctttctgggcagccgccttttccgccctccttggaatcaaatgggtctcttttttatacgacacactgttagccttgagataatattaactttgtgatcaaatattgacttgcggcgcctccaaatcctcttcgtggccgagccacgcactatcctaacagagttatgtttggcagcgcgcggctggggaggggtgggaggtcggccggcgagggggtggggagctgaggaggagaagatgggtaggagttgggggctgaagtggaggcagagtcaaagactagtggacaaagagaaagaaagtttttgcctgcaaagctcagccgcgtgtggttcaggtctcggttctttccctattgccccgttcagtgcctccagccgcccccgcactccgcacaggcactgccttgcagtttccctgggacaagggagggggtccctggagggagaccggacagagggggcccgggacagtcttcgctggaggcagcccgaggcgccccgcgcgttgtcccgcaggttgcttgctgcgaccggaggtggcgtccggggacttcgggcctcggcgccagctcagtatgctggtgggagagtttggggagactctggggtaggggaatgtatttggggtgctggcttgggagtactccatgggacccctgttctagaatctgggcgaggtggagaagggctaggaacgggccacatgcccaagcagcaatccgctcgccaccttcccaagggcgatcgatcatgactctccctgaatgaaacagactcggagtccggagactgggccatcggggacgaaagggctccccggaggcctccccggacgcggaggcctgggcggtgggtgggaggtctgggcaccctccagccgcggtgctaacgctgtcgcctccctcccggggctctgtccgcagggctactcctccgtgagcaacatgaacgccggcctggggatgaacggcatgaacacgtacatgagcatgtcggcggccgccatgggcagcggctcgggcaacatgagcgcgggctccatgaacatgtcgtcgtacgtgggcgctggcatgagcccgtccctggcggggatgtcccccggcgcgggcgccatggcgggcatgggcggctcggccggggcggccggcgtggcgggcatggggccgcacttgagtcccagcctgagcccgctcggggggcaggcggccggggccatgggcggcctggccccctacgccaacatgaactccatgagccccatgtacgggcaggcgggcctgagccgcgcccgcgaccccaagacctacaggcgcagctacacgcacgcaaagccgccctactcgtacatctcgctcatcaccatggccatccagcagagccccaacaagatgctgacgctgagcgagatctaccagtggatcatggacctcttccccttctaccggcagaaccagcagcgctggcagaactccatccgccactcgctctccttcaacgactgtttcctgaaggtgccccgctcgcccgacaagcccggcaagggctccttctggaccctgcaccctgactcgggcaacatgttcgagaacggctgctacctgcgccgccagaagcgcttcaagtgcgagaagcagctggcgctgaaggaggccgcaggcgccgccggcagcggcaagaaggcggccgccggagcccaggcctcacaggctcaactcggggaggccgccgggccggcctccgagactccggcgggcaccgagtcgcctcactcgagcgcctccccgtgccaggagcacaagcgagggggcctgggagagctgaaggggacgccggctgcggcgctgagccccccagagccggcgccctctcccgggcagcagcagcaggccgcggcccacctgctgggcccgccccaccacccgggcctgccgcctgaggcccacctgaagccggaacaccactacgccttcaaccacccgttctccatcaacaacctcatgtcctcggagcagcagcaccaccacagccaccaccaccaccaaccccacaaaatggacctcaaggcctacgaacaggtgatgcactaccccggctacggttcccccatgcctggcagcttggccatgggcccggtcacgaacaaaacgggcctggacgcctcgcccctggccgcagatacctcctactaccagggggtgtactcccggcccattatgaactcctcttaagaagacgacggcttcaggcccggctaactctggcaccccggatcgaggacaagtgagagagcaagtgggggtcgagactttggggagacggtgttgcagagacgcaagggagaagaaatccataacacccccaccccaacacccccaagacagcagtcttcttcacccgctgcagccgttccgtcccaaacagagggccacacagataccccacgttctatataaggaggaaaacgggaaagaatataaagttaaaaaaaagcctccggtttccactactgtgtagactcctgcttcttcaagcacctgcagattctgatttttttgttgttgttgttctcctccattgctgttgttgcagggaagtcttacttaaaaaaaaaaaaaaattttgtgagtgactcggtgtaaaaccatgtagttttaacagaaccagagggttgtactattgtttaaaaacaggaaaaaaaataatgtaagggtctgttgtaaatgaccaagaaaaagaaaaaaaaagcattcccaatcttgacacggtgaaatccaggtctcgggtccgattaatttatggtttctgcgtgctttatttatggcttataaatgtgtattctggctgcaagggccagagttccacaaatctatattaaagtgttatacccggttttatcccttgaatcttttcttccagatttttcttttctttacttggcttacaaaatatacaggcttggaaattatttcaagaaggagggagggataccctgtctggttgcaggttgtattttattttggcccagggagtgttgctgttttcccaacattttattaataaaattttcagacataccaaa

SEQ ID NO: 498 - DNA, 407 bp, Homo sapiens
gcaacatccaaaataaaaatagcatgctaaccccaagcacagtcctcagttataaagcagctttattatagaagccggcggtgacctaacaaaatggaaagggaagggctctgtaggtctcggccctacatgagggtagactaaagagggattgggagaaacatctgcagcccgaggtccccgcgaactttttcctggagagaaactcgggagcaatcttcagcattcaagcctgagccagaactctggataaccctttagaaatcagaactccgggaaggaggagctccaaagaccgctgagctggaagggaacgcgaaccccaggctgtctgaacgtccctgcttccttcgcagcccgttggtgtcccgctcccagctacctaaagctaaccgtagaccccgctc

SEQ ID NO: 499 - DNA, 408 bp, Homo sapiens
gcaacatccaaaataaaaatagcatgctaaccccaagcacagtcctcagttataaagcagctttattatagaagccggcggtgacctaacaaaatggaaagggaagggctctgtaggtctcggccctacatgagggtagactaaagagggattgggagaaacatctgcagcccgaggtccccgcgaactttttcctggagagaaactccgggagcaatcttcagcattcaagcctgagccagaactctggatagccctttagaaatcagaactccgggaaggaggagctccaaagaccgctgagctggaagggaacgcgaaccccaggctgtctgaacgtccctgcttccttcgcagcccgttggtgtcccgctcccagctacctaaagctaaccgtagaccccgctc

SEQ ID NO: 500 - DNA, 1709 bp, Homo sapiens
ggtcacatgactggaattagaattctcttttgatgagtcttttttatattctgtctgggattgtatgtaaacttatctttcctttctaaagaacctcaacatgctaaaatttaaatgcagggttccaattcaaataaagcgtaaggaataaaaccgtttcccttttaaaaaatgtgagaaattttaagtgggcttttttggggtttttgttttttcctaagttacttttcaaagtggaatacctttatacggacacgtgtaatcaaacatcattatttatatttacattctctttggaaaccatgggattctcaaggcccaaagccaagtgcccaagaaccctgaccgaaagtgtgtggttgcctattgagggagcaattgctatattataaagccacagtatgcctttttgccataactggcaacagcaaaatcaaaggattcttgggagaaaattctctatagttctaatcacacatcttgcaagcagaggcactggttgccctttgttccagagctgttttttaaaataacagttgtataataagtagccttaagtggcagagaaagtgtttccttctagagcatggagggatgcttaccgcttattataaaagattctggttccctaagctcagagttttctctcatgtaatgcaatctgctgtgtgtgtgggtgtcatgtggccctctttataacaccctattggaataattggagtcttaggaaccagttcaagaaattactgatactctggctactgctattgctatatggaataaagtctttgtctttgacccagtagttttctgtcctctgctctataaaactgtaataggataacttgttagcttgtaagcggggtaaaatcttagactctttctacttactgacaggaatgtcctttaaaagacacataaagatgatggccctttctttttcctttgtcctcaatcgtaagtggatgtggtgggcttagggataacatagcctgaagtgtggcgtatggatcagatggcaggagacctgttcatctgtggcctgcatcagatggcaggagacccagttctaaatatagaagctggtgtgagtcacagggaatgactgatatttctcagaaggtaagagattgtctctttatgacaattttgggcacctagagacagaaaagacactggatctgatttgaactctatctctttgagctcagattccccccaaaaaatatcatttaaatttacctagagaacacacatgtgtgtgcagtgtagtaaacctcatgtgcagtggctgattacctttggagacagagcagatgaccataagcctcatctgggtaagaacagctcaatttagccatcatacccaggctttaccagcccaggaccccaaagcctacattattctgattggtagcatagcagcatttcttcatatctgccttcctagtatggatacaactttaggaaatggtcctactagactagacagaaatttgactcaaaatggttgaggccatgccaacctgaatagaagtgccagcacatggcttctgtgttatctgttatctcactgctttgagaagcataaagcctcatccaaaacaatgatgtgagggaaagcttacaaagaacactgtggaatggcccttttcatatatgagaaaatatttgaaaacacatacaatacattaatactatgaaaaaaa

SEQ ID NO: 501 - DNA, 1701 bp, Homo sapiens
ggtcacttgactggaattagaattctcttttgatgagtcttttttatattctgtctgggattgtatgtaaacttatctttcctttctaaagaacctcaacatgctaaaatttaaatgcagggttccaattcaaataaagcgtaaggaataaaaccgtttcccttttaaaaaatgtgtgaaattttaagtgggcttttttggggtttttgttttttcctaagttacttttcaaagtggaatacctttatacggacacgtgtaatcaaacatcattatttatatttacattctctttggaaaccatgggattctcaaggcccaaagccaagtgcccaagaaccctgaccgaaagtgtgtggttgcctattgagggagcaattgctatattataaagccacagtatgcctttttgccataactggcaacagcaaaatcaaaggattcttgggagaaaattctctatagttctaatcacacatcttgcaagcagaggcactggttgccctttgttccagagctgttttttaaaataacagttgtataataagtagccttaagtggcagagaaagtgtttccttctagagcatggagggatgcttaccgcttattataaaagattctggttccctaagctcagagttttctctcatgtaatgcaatctgctgtgtgtgtgggtgtcatgtggccctctttataacaccctattggaataattggagtcttaggaaccagttcaagaaattactgatactctggctactgctattgctatatggaataaagtctttgtctttgacccagtagttttttgtcctctgctctataaaactgtaataggataacttgttagcggggtaaaatcttagactctttcttcttactgacaggaatgtcctttaaaagacacataaagatgatggccctttctttttcctttgtcctcaatcgtaagtggatgtggtgggcttagggataacatagcctgaagtgtggcgtatggatcagatggcaggagacctgttcatctgtggcctgcatcagatggcaggagacccagttctaaatatagaagctggtgtgagtcacagggaatgactgatatttctcagaaggtaagagattgtctctttatgacaattttgggcacctagagacagaaaagacactggatctgatttgaactctatctctttgagctcagattccccccaaaaaatatcatttaaatttacctagagaacacacatgcgtgtgcagtgtagtaaacctcatgtgcagtggctgattacctttggagacagagcagatgaccataagcctcatctgggtaagaacagctcaatttagccatcatacccaggctttaccagcccaggaccccaaagcctacattattctgattggtagcatagcagcatttcttcatatctgccttcctagtatggatacaactttaggaaatggtcctactagactagacagaaatttgactcaaaatggttgaggccatgccaacctgaatagaagtgccagcacatggcttctgtgttatctgttatctcactgctttgagaagcataaagcctcatccaaaacaatgatgtgagggaaagcttacaaagaacactgtggaatggcccttttcatatatgagaaaatatttgaaaacacatacaatacattaatactatgaaaaaaa

SEQ ID NO: 502 - DNA, 475 bp, Homo sapiens
tggaagcatctgtgaaactttgtattaacaaaccattatatgttaataatacctatctcagagaactcctgtaaagataaagtaagctaatgtttgcaaatttcttggcacagacagcctggcacacagtaagtgcttaatatgtattgactattataatagggatggagcagttaaaaacatgagtgttttgcactttaggagtttccagaaggaagccaaattttcctgtgtaatttggaaagcataaaatagaggtcaggtgtgaaactggttcccaggagatgatggagaaagacatggaggactctacccactgttaaactgggtcagatcaggatagaccccaaaaaagctgtgctgtgaaatcatctatgtctcacagagggacattgggatccatctgcaaggtgaaccaccatcaccatgaagtcaagggtgaggacaccagtgtagccctcccccaggggcaagg

SEQ ID NO: 503 - DNA, 475 bp, Homo sapiens; identical to SEQ ID NO: 502

SEQ ID NO: 504 - DNA, 16596 bp, Homo sapiens
gtacctttgtactttctacagtgaaagttgctacaggatctccctttctcaataaattcatctgcggtggagaaaatcagcatgtgtactacaggccaagtaggtgcagtcttattctttatgttgtgtcatatctttgtcagtttgtgtgctcatctctttaccaacatctcatcacccagctagtctctgggctcctaaaggtgagaggctgtcataatcatagtatctctcctcctcctctcctttttccttaattcccttttgacttccctcagttctttcatctcttcaataagtaatgtccaagccctttatcagaatttccagagtcaaagatatatccccttctccaaggatctcacagagagacaataattataaaagagcaattataaagcaatatacaaggatagtaaagtagaaagagaatgggagcctcaaggaaaagctcataacccagcttggcttcccagaggtgataccgaaggggaaatcactggagaaatatgaattcaccaggtaaaggagaagtgtgtgcaggcagataaaacaacataaggagtaatacagagactgagaaaatatcccatgcaagaagcttcagaatatgtttgggggctgaaaggtaaagcctgaaacacaaagtgacaggaaataaggttggagagactgacagagagaaaatcctgatgtcagcggatccaggtaagcaaatggtaacaacatcatttttagataggagattggtgtgattaggattatatttcaaatggcaatggtataaaggtgatttcgaaggtggtaaaagcaagaaagagataaagcagaaagcttttttagtactagcagcagtggagaaaagacacatatcctagaaaaatttagactgtgaagattgagggacagaaaaattgaggctacttcccaggtttctacttgggtgagtgaacacatcgcatggctgctagttgaatagaggtagcagagggaggaatatattgagtgttttgtccactagagcgtggtggaaggtggagatgggaagaagaaataatgatatgttcatgttttaacatgttgagtttgagatacctccagtaccttcaaacagcaaatgaatacattagcctataacttagggagaaatatgtcccataaatatagtttactcacataaaggtagtggttgaatctgcaaaaatagataagaccacacagaaagagaatttatagtgacaacagtggtggcctgaaatcagaacctttaagaactaccttgccaccaacaacttctccaacctcaatctgccaagagacaccatttgatgattgcctccattcgttgctccataactcacccttccaccccaaaactgatttttcccatgcttaggatcacaaataactcccacactgtaatgccattcctaccctgaaacagccaccaggccactttattcatagtaatataaaaagtatgacacctgcaatcccactactgggtacctacccacaggaaaatagtatattaaaggtatacctgaacttgcctgtttattgcagcactattaacaatagcaaagatatagaatcaacgttaagtatccatcaacagatgaatggataaacaaaatgcggtacatatacacaatggagtactattcagccgtaaaaaagaatgagatcctgtcatctgcagcaacagggatagaactgaagatcattatcttaagtgaaataagccaggcacaaaaagacaaatatcacatgttcttacgcatacgtgggagctaaaaatttgaacacatggaggtagagagtgggaaaatagataacagagactgggaagggtgagtggagaggatgatgagaagtgggtgaaaaggtacaaacatggccgggcgtggtggctcacgcctgtaatcccagcactttgggaggccaaggtgggcggatcacgaggtcaggagatcaagaacatcctggctaacacagtgaaaccccgtctctactaaaaatacaaaaaaattagccaggcgtggtggtgggcgcctgtagtcccagctactcaggaggctgaggcaggagaatggcatgaacccggaaggcggagcttgcagtgagccgagatcgtgctactgcactccagcctgggcaacagagtgagactccatctcaaaaacaaaaacaaaataaagtacaaacatacaataagatagaaggaataaattcaatgtttgataccagagtagggtcactatgctcaacaaaaatgtattatactcagataatggacaccctgaatacccttacttggtcactacacattatatacatttaacaaaatttttcatgtaccccataaataggcacaattttttttttttgagatggagtctcgctctgttgacagactggagtacagtggcatgatctcagctcattgcaacttccgtctcccaggttcaagcgattctcctgcctcagcctcctgagtagctgggattacaggtgcaggccaccacacctggctaatttttgtatttttagtagagatagggtttcaccatgttggtcaggctggtctcaaactcccgaccttgtgatccgcccgcctcgacctcccaaagtgctggaattacaggcgtgagccaccgtgcctggccaataggcacaatttttttaattaaaatctttaaaagtatgacatctatcctcttggtcatgttacattttgtaaatatagttggtattttcaaaactaatttgaatacagaggctgatagtacaagaaaacttaaattggggtcagaaagactaccttcagcatatatttattcttttttttttctgcagtgcggaaagttggactaatccaatttaatgattctataatcactaatatagcaatcttccaactcccaagcttaaggagcttctctttctgcccctgtattctatttcccaggtcatcagatgcaaagcagccatactctggaagcctggtgcaccattttctattgaagaggtagaagtggccccaccaaaggcaaaggaagttcgcataaaggtaaaaaaaaaaaaaaaaaaaaaaatcacaccaaaagccaaaagccagagcttcttactgtaagttacatattcttatccggatattcaactcagaaaaaaaaataataaaactacatatctttgtatttctttttcattaaacatttccatcaatttttaaatccagccagataaaaggttagggaggtaaagcataggctaactgcccaaaggataaaactcaggcttatttacagctattgtactaattattaatttaaaaaaattctaccttcaaaccctattttaatctgtacttgtaaatttttatggcatccttcataatacttgtcttgaaatattttgaataaaaattgattacagacaaatcatctctgaatctggaaactcaagttagagctggaagggccttagggatacctgatattttacagatgcgaagactgaagccagctgcggtttagtgactggtcacacagctagtagagtaaaaataaagactaatttttctcggctgagcatgatagctcatccctgtaatcccagcactctgggaggcagaggcaggaagattgcttgagtgcaggagatgagaacagtttttctcaaccttggttacctatttggaatcagctggaagctttgaaaaatgctgataaccaagtcccatctccagaaattctgcaattgtgatttaattagtctggggtgcagcctggacatggaaagtttttaaattgccttcagatggttctataggcctcctccaaactagaaaatagtttacctgacttgcagttcagagtcctttgttattattttaattataacaataaagaataagtacagtttaatgatagattacaaagagacagtcattttctaagtcatctcatctgcacagttcatgccttcttctcagagagccttctccatcctacatcccctatggagtaagcagtgggctattgggttgttcgcatccactccccacccacagggtcacaactcatgcaaccaggtttggaccctcactcaaagacattcaaccattatcagacaagctacacatctgaatgtctcaccagtgaatttgaaccaagatatgggcactatagcagagtaagtgatggtaggcaatggtgaggttgggcagactcatcactggttaactgtttttaaccacgatcagcaaaataaatggagaaagccaatctgcagagaataataggtgaatgcaactatgcccatattgaatcaaagtaaagagataaagagaatgactatttggtaaatgtctaggtctatgaggtctgacagcactttctacagttgggttgcaggcaattcaggcaattttatggtattgttccaataatcctccttttacatgcacaaatttcaatatatttcatttcttgactaaggagtatgtgcatgtgaatgtgtggctatgtgtatgcaaacttcatatttgttttagaaatgaagaaactgagacccagaaagaaaaatttacccccaagttcacacagctgagaagggggagagccagtatttcatccctgaacacttaaccactgttctggagtgtcttcattttaaactgtctggctaacttacaataaagtgggattatgacttgtacaaataacaaaactataaagctcacttgtaaaataaattaaggttttaattaaattataataggaaacattattcctttgcctcctgtgttccaatttctttatttcatttcattttagagacagggtctcactctgtcacccagactggagtgcagtggtacaaaatcatagctcactgcagcctcgaactactgggctcaagtgatcctcccacttcagcctcccaagcagcttggactacaggtgcatgcaaccatgcctggctaatttgtttatttattgtagagatggaggtctcactattttgcccaggctgatctcaaactcctgcccttgagtgactctcctgcctcagcctcctgagatgctgggattttaagcataagccactgcactcagctcaattcctttatttttatagtcgttctttctcctccacacttccatctacaagatcaatgaagccaattgagacctcagacatcaagtcacactgcaattttacagcttctcttctgaccccattctacccacactccccagtaaattttcaatcatcttgattctgaaatcagctaatgaaaaacatttcattgctttaacaaattattattgacccttccctagaattaaaactgataagaaatgaatgcagtgtataaatggagaatatcaaactagcaaaaagccttacagtcaacaactctaaaacaccattatctgaaacagcgggaactgcagtaccctttgccttccatacaggttgtggccaccggactgtgtggtacagagatgaaagtgttggggagtaaacacttggacctcttgtatcccaccatcttgggccatgaaggggctggaatcgttgagagtattggagaaggagtaagcacagtgaaaccaggtaggaattagcacctggtaataggaaacagcaacaacttggaaccaactcgagaaaatgataagcaccccttaagtatgtcaggatcaagtgaaatgaaaggtgaaatgtttccaacttcttagaaaagtagggataaattacttgtaagttacataaaatactaaatatattgtattctttgcatttacattttgaaaataagaaaaaacaagaagtagaatgcactgaaactggacttgaaagtacaaatgagacaaaaatttatgaaaaaaaggttgactgaggtaaactattgaacaattatttaaatgaggcatatgataaataatcaaacacattagtggaaccaaataaagaagcagtccagaattgaatccaaataaacataagaagttaatgcagcatgaggtttgtctttcaaacttaagaatagaaacagattattccacaaattgtgttgaaacaactagatagttatccgggctaaaaaagtaaattgggttgccatctcattctttatataaaaaaattatacatgcatctaaaaattaaatgtgaaaagcaaaaccatagaagtactataaaataacatgggagaacactgtattatcttggaggagggaaggaaattttaatcaatacaaaaaaatacccagcagatataaaatagatatttatatagataaatttgacaatgtaaaaattacatagattctgcatgtttaaaaaaaaccccaaaagtcaaaacccagtatgacaatggaccaattttcttaatatagaaataatttctttaaaagcaatttttaaataaaaaaaggcaaacaaaatacatgtctaatttaaagaaatatatatatacacatatatgtgtgtgtatatatatatatgaatgctttaaacacattaaaatatgcccaacctcagacatattaaaaataaaaaacattttaaaaggctgggggtgggaaaaatggagagatgtggtcaaatggtataaaatttctgctagataggaaaaataagttttttgagatctattgaacagcatggtgatcacagttgataataatgaattatactatatttcaaaattgctaagagtatacatttcaaatgttcttaccacaaaatataagtcttcaagtgtttaacatgttaattactttgatttaatcatcccatattatatacacataatatcacattgtaccccataaatatataatttgtcaatttacgataaaattttaaaatgcaatgaaaaaacactttttccctagcagatcggcaaagattaagaagtttgataatatatagagttcacaagaatataggcagacagctccctcatatcttattgtttggaacgtagatttgctcgactctaaatgcagcaatatgtaatatcatttaaatttatatattcttggacacaacagtttcaattctagaaacttattccatagatatatgttcatgtactcattttctattgctgctggaaaaaatcaccacaaatataacagtttaaaacaacacaagtttattatctcagtttctataggtcagaaatctgagtgggcttggctgagttttctgctcacgtttcaaggtcaaaatcaagcgagtagccagctgggtccttatctggagcctctggagaaaaatccacttccaagttcattcaagtagttttcagaatccaattccttgaggctataggactgagatccttatttcctcaccagtggtcggctccctgaaattgctcacatttcttcttctgtggcaccttccagcctcgaagcagccatggcccactaaatccttccacaggtgttaagtcacttttacttcctcttctgccttcatctgctcttcttcttttgatggctcatgtgattaccttgggtccacctggataattcagtataatctccctatcttaatgacaactgattagtgaacttagttacatctacagagtaccccttgccatgtagcataacatactcacaggcatgacaccacaacatagtcacagtttctagggatttgtgcaggatatctttcggagggcattttagaactctgtctacaataagatactcattgcattactggttttagtgttggggtgtagagaaacaaagaacaacctaaatatctatcagtgttcatggcactggttaatgatggagcactatatgtactaaaatagaaagctccatgatacagtgttaagtaaaaaagctaggcccaaaccagggtagatagcatgcttacctttgcatttttaaaggggttacagtgctgaaaaatatcgtggttactggtcagagtacctgtctctaagatggggaactggggaatagagtaataattttcacttttgtgcagtttaaatttttaccatatgtatgtgttactttttaaaaaaataaaaataaataaaatagaagaaactaaatcttcataaggtttttaactaaaagtataaaacaaatttctctggtttacagtgttagaccatgggggcagccagtaaaatacatcacaggcaagctcttctaatcatgtcctgatactttgaccactactagagaaatctgcctacctttgatctctaaggtcaagaagaaagggttgatgtcaaacacagagaacagcatagaagcaattttttttctccctaatccagagcttactctgttagtatgtggtatccatactattttaaattcaatccctgagagaggaaattagtgttgaaaatgttgagaagagataagacttgactgaatggatatatgacaaaaaactatttcatacttgaaaaggagcttacaaaagaggcaaatctggggccagttcctcaagattcagccactgagcccagggctgggcccagatgctaaagacattctctctttttgtaagtatttgatattctttgtggtatcaagcacaactgaatgtggaaataattttcagctgtcatttcttcttgggtgccttgctgtcaaaatcctgaaagacagctatgtctttactttaaaaaataatatgttaataagacatgattttgctcttttaggtgacaaagttatcacactctttctgccacagtgtggagaatgtacctcttgcctgaattctgagggcaatttttgtatacaattcaagtaagtttttactaatattttctttttgaaaacttaattcactttcattggagaagatctaagctttctaattcaaaataaactttgtgttttgttttttgttttgtctataaaagacagtcaaaaacccaactgatgtctgatggtaccagcaggtttacctgcaagggaaaatcaatatatcactttggtaataccagcaccttctgtgaatacacagtgataaaggaaatctcagttgccaagattgatgcagtcgctcctctagagaaagtatgcctaattagctgtggcttttccactgggtttggtgctgcaatcaatactgccaaggtgaggggcatttatacccatttggaagggaattattgggatatggagttgaaaggcctcttgcatctttgtcatctcttatcataccaaaggaaaaatcccaagcctgactccaaacatccttgagttctctgctatctacctagtcatcccacacccccttcaacatttttcccattccctcttggtgagtagtaaaagacagattaagtctggatgccattcacaagtggaaagatcaggaattactggaaattaaatctaacatagttacaacatgactctgtggcctttcatattccagtttatcctttctttccttagacaaatattttcggagccattcactgtcccaggtgctagaattcagcagctaacaaaactcatgaagctaatattatattgcatgatatattaggtagtgataaatgctaataaaaagaaaaggagagtaaaggaaccaagtgatgaagtaggtgttactacattagacagattgaccaggggatcccactctggctgaatgggctgctattgaactcttatttctaaaacatcactcaaaccttcccggctcccttcctaaaggtgctgttgaattttagaactttgcattttccagtgtccatcagtcccaatactatacagagagatagaatggaaaaaaattatttaaattagtcctatgtaggacagtactcaataaaaaaaaagcctttgccttcacaaggtattgacccgataagttatgaaaaatttacagataccgagagagagagagagagacagagagaaatggttgtaggaagatagagataattttaaagaactcaaaaatatctggaattaaatacactgtcaagtaagtcttaatattcaatgcaaattcatttaaactactactcagactaattcctgggacttgaaactctactttcaggcagttttttgttcctgtgccaagagtattccatatctagaaatatttttgaaaaatcaaaactttgtagttataatatgttatgtatgtaaacatcatttgcttatgactcgttaaaaaatacatgcatatagacttagccttcccaactgagtaaaggtgtatgttctctttgctttttgttttctgagttttctgcctgtatgtgtttaggtgactccaggttctacctgtgctgtgtttggcctgggaggagtcggcttgtctgttgtcatgggttgtaaagcagcaggagcagccaggatcattggagtggatgtcaacaaggagaaatttaagaaggcacaggaattgggtgctactgagtgcctcaaccctcaggacttaaagaaacccattcaagaagttttatttgatatgacagatgctggtatagacttctgctttgaggccattggaaatctggacgttctggtatgtaatcctctggagtgaaaattaccaatacttttaccagtcatcgtttagattatagttgaatgagctttctaaaattccctccactttgctctatttaattttccttgtgttccatgacatctcagctggtgccgtctgtgtactcttacaaatttgttcactatcccagatactaaatctagaactttcatataatttcaaagccagaagttttaagcaagataagattaaaatttgattaatgaccttataaatcaatgtgcttttcactttcagtcgtctttcatgtcagatctgagataagtttccaagaaaaatatttactagtcacgattaaacgggttcatttcaaaaatgaaggggaaaaaaagtggtggtttttctggctaaacgtggtttatataaaagaatagaaagtgaggggaagttacttaaaaatctaaggcttgttttctttggggatttgaagaaataatgtattattaggttgcatggctctatcgtctagtcagctgtatggaaactcaacaactgcctcttccaacttgggcccttttcccagcataaaaaatcttttcatgattcaccatacataaattcctttatctgtaagaagaaacagcaaaacctttctcacactcttactctgagaaatagcctttgaacataacgaatgtaacggtatctgtttctcactttgctatcatcttattatataaatatctgtcttcttagatgtctaaaagaaaaatgtcaattcttaccagccacctgcatcagtaataatttttataaaaattatttttattattatcactactgtggatgtttttactattttcatttttgttatttccatttattgagtcctaaagtgccaggtactatactaagcaacatacaacgtcttatatgtgtttcatagcatccttacaagataaatgttacttcaaatgagaatagggagaatcagaaaagaaagtcatagaccatttaggagttaagctgaaattaagatgtaggctcaatcctcacatacatcttttaacccctatactgtattgcatcactttctaacaggcagctgccctcgcctcctgcaatgagagctatggggtctgtgtggttgttggggtgttgcctgccagtgttcaactcaaaatcagtggccagttgttcttctcaggacgttctttgaagggttctgtttttggaggtatggatgaagcagggaaaggtggaaatgcctgaggaggtgaaggtgggaaatagaaaaatgtaccataaacgcttaagaaaggacataaaacaacagctttatattacagattttttttttcaacatatgaatacccaatataaagggatggatagtgggtgtatctagtgcctcttggaaagctttttctcatgcaaagatagagaagaggtttcttaattgattggtaaagaatccagtgtccaacatttaaagcaaactctaaattgaaaagaaggcaatattgtaatctataactacacttcagcgaaattatacacctgccagctgggattctttggagaatatacttagccattagttgtcattgttcaactcatgtaaaatcttatcccaaacaaatgagttgtcacgctaccaactcaaatatattaaacacaatggattcttgatttaaaagaaatactattgattaaaaaaaataagaattattttacccagaggaaaaatatcttatagaatcctttgattttctgttttttacctgtcctggaacatttttatagactttagaagactattttattgaaaaagtagaagacaaactaaattaaataaatctgcttaagattctgggctcataagcaagaaatctgaaatttacgaagaaatgtatttatccagaaactctgggcaatctgaatgcctgggcaaaaagagatgagaattagaggagtgcctgaattacttgcacaagtgagctgtctgtagtccccaagtaagctatggcagcatgttattacagatattagaagccttacctaattcatttataaagagtagatacatggcaggaccagcaaaaaaaaaaaagtaataatccagttatatatataatctattaaatagaagaactgtaatttcagttcttctatttaagatcattgaatacatccattgccatttctctctattgtatttatagatgataatgttaattcaaaatacacatactcagctaagtcttataaaaataagattaccaatattcttaaaaccctcagtgaatgaaactaattcactggccactctagcactcatatagtgatcattaatgtaaattagtttattccacaaatagtatagtcctctggttcaatgattttcaatcaacaatagcatttaacaggtgttggacagtcctgctaaacctcccacaatgtgcaaaagaaagaatgttccccacccaaaatgccagtagtgcccttgttgagaaacactgcctagtcccgtctgtggtcctagaattttctttcctatgtcatttggttgaaataagaaaaaaagtggagggttgacatagatgtaaaaatgttttatcagatcaccaatcaaaatataaaaacaaatagaaatatacactggcccttcatgtcatgacatagaacagtaattagtattcttggttacacataacagaaacaaacttaaattaaaaataaatctattagaagagtttgtggtagtttggagaagaagttggggagcctaacctaagctagaaccaagaaaagcaagtaattgtcaagatcctatcacagaataatccgcatagaacactaagcagattacgccacattatactttgcacaattacaccacacccaccctttctagcaatgagcagactgccaaagtctgtgtggtaactcactgagcgtggcacttagcacagtgctaaatttaatgtgtttcttgaaaatcacgggaatagagaaaatacaatgctaaactacatcttaccttagctaactccatctttgcttgttcaattcttacttccagaaagcacattttattcttatattgctttgtacacattcttttcccaagagctttcactgggactgctgccacagtgagagttcttcttttcctttaagctatttgactcttttatgaagtggcagatcaaaacatacacatgagggaatgcacacacaaaaaaatgtgctatatttaacatttgaattgcttctttccatgattcccaagaccttggcctttgttatacattagatatagattcactgctccccagagattgcaacatgacaccaggaacactcaaggcaaggtccacattctatctgctttgaattaattctcctctgtagtaccagaagtctcctttaggaacacagccctctatataatgtgtgtggttggggtaggcattctcctgatgattgaggcaagtaaacgggacaggcttagattttctcagtcaaagccaacaacttcagcagttactttgaatgacctttcctttataatgaagcctcatgtgtaaaattcatcattaatctgtatttccaggctggaagagcagacagcacatccctaaactggttgctgattatatggcagagaagttgaatctagatccactaattactcatactctgaatcttgataaaatcaatgaagcagttgaattaatgaaaactggaaaatggtaaactgcccacataaattttatgtctgtgtgtttgagaccaagagaaagggtgtattggcttgggagtagaagaagggtcgtccctgctgcagaagctgtatactgataattgaagaggctttcaggaatttgtaaagcatctccttcccctctgcattttgttttatttctagctaataaaatacataatcctgaaagtatttaagtgttcacctaccgttacttttgccattagcattgtatttccaatatggattttttttttacatgacatattaatggaagtcagcttataaaattgtagctcaagtttaaaaacataagaaggtagttcacaaataggccattgttgtatttgttgttctactttgggggagaagaggaattattcataggattcctaattctgaatcctatctttgacccaaaaaacagaaaccagccataacccagaaactggcattccccacacgagtataagcttgcttacctactttttacccttggagtttcatgtcattttaaaaaatcttcccatggcttatttaatcttctcatttttcacctaaagagaaaaaaaatctagtttactgctctacaaagtgagaatttgaaatccaaaacacaaatgttgctctaaaaatgttccaaccttttttctcttcttctttttttcagtatccgctgtatcctgttactttaagtacaatgtaatacatgcaagacccaaaggatatttcaccaactcaatggcatttgatgtaattttcatgatttagaagaattattcacccaatcccatttctatattctgacttctgattcactccgcagtggacctatatctggcttctgacctaaccatttcatcaaaattgttcttacgtaacccagtgtcaccaaggatcagcctccttttcagagctagattaaggttggcttgaatcactcaactccacatccttcagacataaaaggtcaatgcaagatgctcccattttcatagttcctctacctgtggacctttatattcttgtacactatatgtctctctcacaggcctagacatgaaactctgccattttactctaaagaaacaaaactccgcattaatgagtttattgaagattcaggttaacctgaatcaagttaacccagtctcaaatgctcacttatcctatctccttggcacaaatctctcctctcctggattgccaaagaaaattcaaattattcttcaattagtcaggatgatttgactatcagcagttcatagtacccatcttcataactaagccacctagggatccagcagaaaaaaaagggatgaggggagtcatcatacaggaggtggatcatttagcaggatccacacttcctacaaagcggttgtaatattaaataacaaaactgttttttattccaatcttcacataaaacaggaataattgtatactttcttactaatgtgttccatggagtttttcctccaagaagtggcttaggggaaaatgagccccagtaatgctttgtggcatccaatccttctaccccgaccctttgactttctgccccagcccctcttagttctcctagaattaggactaaggttaagtgccctcttgggatatgacttccttcccttcctcttgatacaaaaagagcctattaccaaccctcatacacacaagagttcccttcctagttgcagactcttctgctccagctggactcccctagctctggactcccactagatcacacaggggtccctgcatgtcagtaaactttggatgaccttgggagaccaaaaaatggaatatcattttttgatctaaacaaaatagtttcctgatttaacactggccaggaaggtgggctgcaccctcagtctctctctcccatcatggttttcacatgatatcaaaggactctcataacagtctgattcttatgagttgggcatcctgtgtttccctttaggggcctgcttccttcaaatagaggagatgggtgctatgaaacctattcactctggacttgggatggctcttctccatcttcccaagtctgagctggagcctccatgcccaactctgctctgctcttctatttcctgacagcagctaaggcatgttcctgttctgcccccaaattgaccttactaacagtgagaacttggaggagtcttcgggtcttgggaaatccaagttttcccggaaacgttttgttgtaaacagtgtccacactctttgctccaataaagctcggttccttaagccac

SEQ ID NO: 505 - DNA, 266 bp, Homo sapiens
cctctagtcccagctactcgggaggatgaggtaggagaatctaaagccaagaagttggaggctgcagtgtgccaggattatgctactgctctccatcctgggcaaaaaagcgagaccctgtctcacaaaaagaaaaacaaaatgcctttggcagcactgtggaggatagtatgaagaggacagagactggaagtaggaaaaataattgacaagctgtgcgttaaggcacaattgagaagctgtgtattaaggtgcaattaaggaga

SEQ ID NO: 506 - DNA, 322 bp, Homo sapiens
cggccgggcgcggtggctgacgcctgtaatcccagcactttgggaggccgaggcgggcggatcacgaggtcaggagatcgagaccatcctggctaacacggtgaaaccccgtctctactaaaaatacaaaaaattagccgggcgtggtagcgggcgcctgtagtcccagctactcgggaggctgaggcaggagaatggcgtgaacccgggaggcggagctttcagtgagccgagatcgcgccactgcactccagcctgggcgacagagcgagactccgtctcaaaaaaaaaaaaaaaaaaaaaaaaaaaaaaaaaaaaattc

SEQ ID NO: 507 - DNA, 279 bp, Homo sapiens
cactttgggaggccgaggcgggcggatcacgaggtcaggagatcgagaccattctggctaacacggtgaaaccccgtctctactaaaaatacaaaaaattagccgggcgtggtagcgggcgcctgtagtcccagctactcgggaggctgaggcaggagaatggcgtgaacccgggaggcggagcttgcagtgagccgagatcgcgccactgcactccagcctgggcgacagagcgagactccgtctcaaaaaaaaaaaaaaaaaaaaaaaaaaaaaaga

SEQ ID NO: 508 - DNA, 153 bp, Homo sapiens
cccagctactcgggaggctgaggcaggagaatggcgtgaacccgggaggcggagcttgcagtgagccgagatcgcgccactgcactccagcctgggcgacagagcgagactccgtctcaaaaaaaaaaaaaaaaaaaagaaagcagtggggcc

SEQ ID NO: 509 - DNA, 61 bp, Homo sapiens
atgccactgcactccagcctgggcgacagagtgagactccatctcaaaaaaaaaaaaaaaa

SEQ ID NO: 510 - DNA, 193 bp, Homo sapiens
aaaaattagccgggcgtggtggcgggcgcctgtagtcccagctactcgagaggctgaggcaggagaatggcgtgaacccgggaggcggagcttgcagtgagccgagatcgcgccactgcactccagcctgggcgacagagcgagactccgtctcaaaaaaaaaaaaaaaaaaaaaaaagatcagaaaaaaata

SEQ ID NO: 511 - DNA, 175 bp, Homo sapiens
cgggcgtagtggcgggcgcctgtagtcccagctacttgggaggctgaggcaggagaatggcgtgaacccgggaggcggagcttgcagtgagccgagattgcgccactgcactccagcctgggcgacagagcgagactccgtctcaaaaaaaaaaaaaaaaaaaaaaaaaaatcac

SEQ ID NO: 512 - DNA, 150 bp, Homo sapiens
ggcgcctgtagtcccagctactcgggaggctgaggcaggagaatggcgtgaacccgggaggcggagcttgcagtgagctgagatcgcgccactgcactccagcctgggcgacagagcgagactctgtctcaaaaaaaaaaaagaattggc

SEQ ID NO: 513 - DNA, 2364 bp, Homo sapiens
ctcactcctgtaatcccagcactttgggaggccgaggcgggcggatcacgaggtcaggagatcgagaccatcctggctaacacggtgaaaccccgtctctactaaaaatacaaaaaaaaaattagccgggcgtggtagcgggcgcctgtagtcccagctactcgggaggctgaggcaggagaatggcgtgaacctgggaggcggagcttgcagtgagccgagatcgcgccactgcactccagcctgggcgacagagcgagactccgtctcaaaaaaaaaaaaaaaaaaaaaaaagaataaagtataagagaacatgagtgaatgcctgtcatctttttttttttttcttcaaaaacagggtctcactttgtcacccaggctgcagtgcagtggcgcaatcatggctcactgcaacctctagcacctgggctcaagagctcaagaggtcctaccaactcagcctcccaaggagctgggactacaggtgcatgccaccacaccctaaggtaaatttttgtgtttttatagagacaggttttaccatgttgcccaggctgttctgaaactcctgggcttaagggatcgacccacctccatctcccaaggcactgggattataggcatgagccaccgcgcctggcctatcatcatttattcatttattcatctatgcaaaaatattctttgagtgcctaattgctaagcaatgggacaagcactggcaagtcacactggcaaaatatcatcccgccactcaaggagcttataggtcagctggggagacaaagaagaacatgggcccttgtaatgagctaagtatggtgctaggggaaatatccataagttatgggaacccagaggaattcattcatttattcgtttagtaaatatttatgtgccaaactcttgggacccaatggtgacctaagcagacaagacacatccacctacagtgtttacagagtagtgtgggagacagacattaatgaaatgctcttacagacctatcattacctattgtcatatgagttatgaaagaaaaataacaggccgggcatgatggctcacgcctgtaatcccagcactttgggagaccaaggcaggtggatcacttgaggtcaggagttcaagaccagcctggccaacatgatgaaaccccatctctactaaaaatacaaaaaaaaaaaaattatctgggcatggtggcaggcagctgtaatcccagctactcgggaggctgaggcaggaaactcgcttgaacctgggaggcagaggttgcactgagctgagattgcaccactgcactccagcctgggtgacagagcaagactctgtcaaaaaaaaaaaaaaaaaagaaaggaaggaaaggaaggaaggaaggaaggaaggaaatagagtgtaagaggggggcctagtgtagtctaagatgactcaggagaagctgtttgagctgatgcctgaagacgggttgcatgtaagtagttgagtaggtaaaagagaggggtactatcatatcagggattcgggagaaaaaaaaagagagagagagaggggaagagtgctgtggacccattgagctccagcccagctccaactctgtgggtcaggaaagactttccagcatctaagctgagtccagaaggatgagtaggagtgagccagctgaggaggagctggggtggaaggaaagcattccagagcagcagatagcttgtgcaaaggcacacaggcagctgggtgtggtggctcacacctgtaatcccagcactgtgggaggccaagatgggtggaccgtttgagcccaggaattcaagaccaacctggatgacatagtgaaaccctgtctctaccaaaaaaaaaaaaaaaaaaattgaaaaaaaaaaagaagctgggcatggtggcgtgcacctgtggtcccagctacccaggaaactgaggtgggagggaagtcgaggctgtagtgaaccatggtggcaccattgcattccagcccgggtgacagagcaaggccctgtacaaaaaaaaaaaaaaaaaaagcatggaggcaacagaacatagtggattggaaggaaaaacaagtggttcagaccaggtgcagtggctcatgcctgtaatcccagcactttgggaggccgaggcgggcagatcacgaggtcaggagatcaagaccatcctcgctaacacagtgaaaccccgtctctactaaaaatacaaaaaaattagccaggcgtggtggtgcgtgcctgtagtcccagctactcaagaggctgaggcaggagaatggcgtgaacctgggaggcagagcttgcagtgagcggagatcatgccactgcactccagcctgggcgacagagcaagactcca

SEQ ID NO: 514 - DNA, 310 bp, Homo sapiens
ggacgggcgcggtggctcacgcctgtaatcccagcactttgggaggccgaggcgggcggatcacgaggtcaggagatcgagaccatcccggctaaaacggtgaaaccccgtctctactaaaaatacaaaaaattagccgggcgtagtggcgggcgcctgtagtcccagctacttgggaggctgaggcaggagaatggcgtgaacccgggaggcggaggttgcagtgagccgagatcccgccactgcactccagcctgggcgacagagcgagactccgtctcaaaaaaaaaaaaaaaaaaaaaaaaaaaat

SEQ ID NO: 515 - DNA, 140 bp, Homo sapiens
ggctgaggcaggagaatggcgtgaacccgggaggcggagcttgcagtgagtcgagatcgcgccactgcactccagcctgggcgacagagcgaaactccgtctcaaaaaaaaaaaaaaaaaaaaaaaaaaagaggggaaaa

SEQ ID NO: 516 - DNA, 184 bp, Homo sapiens
cgtggtggcgggcgcctgtagtcccagctactcgggaggctgaggcaggagaatggcgtgaacctgggaggcggagcttgcagtgagccgagatcgcgccactgcactccagcctgggcgacagagcgagagtccgtctcaaaaaaaaaaaaaaaaaagaaaagaaaaaagaacaaacaacagc

SEQ ID NO: 517 - DNA, 45 bp, Homo sapiens
ccagcctgggggacagagcgagactccgtctcaaaaaaaaaaaaa

SEQ ID NO: 518 - DNA, 919 bp, Homo sapiens
  SITE (454): n equals a,t,g, or c
  SITE (455): n equals a,t,g, or c
  SITE (456): n equals a,t,g, or c
  SITE (457): n equals a,t,g, or c
  SITE (458): n equals a,t,g, or c
  SITE (459): n equals a,t,g, or c
  SITE (460): n equals a,t,g, or c
  SITE (461): n equals a,t,g, or c
  SITE (462): n equals a,t,g, or c
  SITE (463): n equals a,t,g, or c
  SITE (464): n equals a,t,g, or c
  SITE (465): n equals a,t,g, or c
  SITE (466): n equals a,t,g, or c
  SITE (467): n equals a,t,g, or c
  SITE (468): n equals a,t,g, or c
  SITE (469): n equals a,t,g, or c
  SITE (470): n equals a,t,g, or c
  SITE (471): n equals a,t,g, or c
  SITE (472): n equals a,t,g, or c
  SITE (473): n equals a,t,g, or c
  SITE (474): n equals a,t,g, or c
  SITE (475): n equals a,t,g, or c
  SITE (476): n equals a,t,g, or c
  SITE (477): n equals a,t,g, or c
  SITE (478): n equals a,t,g, or c
  SITE (479): n equals a,t,g, or c
  SITE (480): n equals a,t,g, or c
  SITE (481): n equals a,t,g, or c
  SITE (482): n equals a,t,g, or c
  SITE (483): n equals a,t,g, or c
  SITE (484): n equals a,t,g, or c
  SITE (485): n equals a,t,g, or c
  SITE (486): n equals a,t,g, or c
  SITE (487): n equals a,t,g, or c
  SITE (488): n equals a,t,g, or c
  SITE (489): n equals a,t,g, or c
  SITE (490): n equals a,t,g, or c
  SITE (491): n equals a,t,g, or c
  SITE (492): n equals a,t,g, or c
  SITE (493): n equals a,t,g, or c
  SITE (494): n equals a,t,g, or c
  SITE (495): n equals a,t,g, or c
  SITE (496): n equals a,t,g, or c
  SITE (497): n equals a,t,g, or c
  SITE (498): n equals a,t,g, or c
  SITE (499): n equals a,t,g, or c
  SITE (500): n equals a,t,g, or c
  SITE (501): n equals a,t,g, or c
  SITE (502): n equals a,t,g, or c
  SITE (503): n equals a,t,g, or c
  SITE (504): n equals a,t,g, or c
  SITE (505): n equals a,t,g, or c
  SITE (506): n equals a,t,g, or c
  SITE (507): n equals a,t,g, or c
  SITE (508): n equals a,t,g, or c
  SITE (509): n equals a,t,g, or c
  SITE (510): n equals a,t,g, or c
  SITE (511): n equals a,t,g, or c
  SITE (512): n equals a,t,g, or c
  SITE (513): n equals a,t,g, or c
  SITE (514): n equals a,t,g, or c
  SITE (515): n equals a,t,g, or c
  SITE (516): n equals a,t,g, or c
  SITE (517): n equals a,t,g, or c
  SITE (518): n equals a,t,g, or c
  SITE (519): n equals a,t,g, or c
  SITE (520): n equals a,t,g, or c
  SITE (521): n equals a,t,g, or c
  SITE (522): n equals a,t,g, or c
  SITE (523): n equals a,t,g, or c
  SITE (524): n equals a,t,g, or c
  SITE (525): n equals a,t,g, or c
  SITE (526): n equals a,t,g, or c
  SITE (527): n equals a,t,g, or c
  SITE (528): n equals a,t,g, or c
  SITE (529): n equals a,t,g, or c
  SITE (530): n equals a,t,g, or c
  SITE (531): n equals a,t,g, or c
  SITE (532): n equals a,t,g, or c
  SITE (533): n equals a,t,g, or c
  SITE (534): n equals a,t,g, or c
  SITE (535): n equals a,t,g, or c
  SITE (536): n equals a,t,g, or c
  SITE (537): n equals a,t,g, or c
  SITE (538): n equals a,t,g, or c
  SITE (539): n equals a,t,g, or c
  SITE (540): n equals a,t,g, or c
  SITE (541): n equals a,t,g, or c
  SITE (542): n equals a,t,g, or c
  SITE (543): n equals a,t,g, or c
  SITE (544): n equals a,t,g, or c
  SITE (545): n equals a,t,g, or c
  SITE (546): n equals a,t,g, or c
  SITE (547): n equals a,t,g, or c
  SITE (548): n equals a,t,g, or c
  SITE (549): n equals a,t,g, or c
  SITE (550): n equals a,t,g, or c
  SITE (551): n equals a,t,g, or c
  SITE (552): n equals a,t,g, or c
  SITE (553): n equals a,t,g, or c
  SITE (554): n equals a,t,g, or c
  SITE (555): n equals a,t,g, or c
  SITE (556): n equals a,t,g, or c
  SITE (557): n equals a,t,g, or c
  SITE (558): n equals a,t,g, or c
  SITE (559): n equals a,t,g, or c
  SITE (560): n equals a,t,g, or c
  SITE (561): n equals a,t,g, or c
  SITE (562): n equals a,t,g, or c
  SITE (563): n equals a,t,g, or c
  SITE (564): n equals a,t,g, or c
  SITE (565): n equals a,t,g, or c
  SITE (566): n equals a,t,g, or c
  SITE (567): n equals a,t,g, or c
  SITE (568): n equals a,t,g, or c
  SITE (569): n equals a,t,g, or c
  SITE (570): n equals a,t,g, or c
  SITE (571): n equals a,t,g, or c
  SITE (572): n equals a,t,g, or c
  SITE (573): n equals a,t,g, or c
  SITE (574): n equals a,t,g, or c
  SITE (575): n equals a,t,g, or c
  SITE (576): n equals a,t,g, or c
  SITE (577): n equals a,t,g, or c
  SITE (578): n equals a,t,g, or c
  SITE (579): n equals a,t,g, or c
  SITE (580): n equals a,t,g, or c
  SITE (581): n equals a,t,g, or c
  SITE (582): n equals a,t,g, or c
  SITE (583): n equals a,t,g, or c
  SITE (584): n equals a,t,g, or c
  SITE (585): n equals a,t,g, or c
  SITE (586): n equals a,t,g, or c
  SITE (587): n equals a,t,g, or c
  SITE (588): n equals a,t,g, or c
  SITE (589): n equals a,t,g, or c
  SITE (590): n equals a,t,g, or c
  SITE (591): n equals a,t,g, or c
  SITE (592): n equals a,t,g, or c
  SITE (593): n equals a,t,g, or c
  SITE (594): n equals a,t,g, or c
  SITE (595): n equals a,t,g, or c
  SITE (596): n equals a,t,g, or c
  SITE (597): n equals a,t,g, or c
  SITE (598): n equals a,t,g, or c
  SITE (599): n equals a,t,g, or c
  SITE (600): n equals a,t,g, or c
  SITE (601): n equals a,t,g, or c
  SITE (602): n equals a,t,g, or c
  SITE (603): n equals a,t,g, or c
  SITE (604): n equals a,t,g, or c
  SITE (605): n equals a,t,g, or c
  SITE (606): n equals a,t,g, or c
  SITE (607): n equals a,t,g, or c
  SITE (608): n equals a,t,g, or c
  SITE (609): n equals a,t,g, or c
  SITE (610): n equals a,t,g, or c
  SITE (611): n equals a,t,g, or c
  SITE (612): n equals a,t,g, or c
  SITE (613): n equals a,t,g, or c
  SITE (614): n equals a,t,g, or c
  SITE (615): n equals a,t,g, or c
  SITE (616): n equals a,t,g, or c
  SITE (617): n equals a,t,g, or c
  SITE (618): n equals a,t,g, or c
  SITE (619): n equals a,t,g, or c
  SITE (620): n equals a,t,g, or c
  SITE (621): n equals a,t,g, or c
  SITE (622): n equals a,t,g, or c
  SITE (623): n equals a,t,g, or c
  SITE (624): n equals a,t,g, or c
  SITE (625): n equals a,t,g, or c
  SITE (626): n equals a,t,g, or c
  SITE (627): n equals a,t,g, or c
  SITE (628): n equals a,t,g, or c
  SITE (629): n equals a,t,g, or c
  SITE (630): n equals a,t,g, or c
  SITE (631): n equals a,t,g, or c
  SITE (632): n equals a,t,g, or c
  SITE (633): n equals a,t,g, or c
  SITE (634): n equals a,t,g, or c
  SITE (635): n equals a,t,g, or c
  SITE (636): n equals a,t,g, or c
  SITE (637): n equals a,t,g, or c
  SITE (638): n equals a,t,g, or c
  SITE (639): n equals a,t,g, or c
  SITE (640): n equals a,t,g, or c
  SITE (641): n equals a,t,g, or c
  SITE (642): n equals a,t,g, or c
  SITE (643): n equals a,t,g, or c
  SITE (644): n equals a,t,g, or c
  SITE (645): n equals a,t,g, or c
  SITE (646): n equals a,t,g, or c
  SITE (647): n equals a,t,g, or c
  SITE (648): n equals a,t,g, or c
  SITE (649): n equals a,t,g, or c
  SITE (650): n equals a,t,g, or c
  SITE (651): n equals a,t,g, or c
  SITE (652): n equals a,t,g, or c
  SITE (653): n equals a,t,g, or c
  SITE (654): n equals a,t,g, or c
  SITE (655): n equals a,t,g, or c
  SITE (656): n equals a,t,g, or c
  SITE (657): n equals a,t,g, or c
  SITE (658): n equals a,t,g, or c
  SITE (659): n equals a,t,g, or c
  SITE (660): n equals a,t,g, or c
  SITE (661): n equals a,t,g, or c
  SITE (662): n equals a,t,g, or c
  SITE (663): n equals a,t,g, or c
  SITE (664): n equals a,t,g, or c
  SITE (665): n equals a,t,g, or c
  SITE (666): n equals a,t,g, or c
  SITE (667): n equals a,t,g, or c
  SITE (668): n equals a,t,g, or c
  SITE (669): n equals a,t,g, or c
  SITE (670): n equals a,t,g, or c
  SITE (671): n equals a,t,g, or c
  SITE (672): n equals a,t,g, or c
  SITE (673): n equals a,t,g, or c
  SITE (674): n equals a,t,g, or c
  SITE (675): n equals a,t,g, or c
  SITE (676): n equals a,t,g, or c
  SITE (677): n equals a,t,g, or c
  SITE (678): n equals a,t,g, or c
  SITE (679): n equals a,t,g, or c
  SITE (680): n equals a,t,g, or c
  SITE (681): n equals a,t,g, or c
  SITE (682): n equals a,t,g, or c
  SITE (683): n equals a,t,g, or c
  SITE (684): n equals a,t,g, or c
  SITE (685): n equals a,t,g, or c
  SITE (686): n equals a,t,g, or c
  SITE (687): n equals a,t,g, or c
  SITE (688): n equals a,t,g, or c
  SITE (689): n equals a,t,g, or c
  SITE (690): n equals a,t,g, or c
  SITE (691): n equals a,t,g, or c
  SITE (692): n equals a,t,g, or c
  SITE (693): n equals a,t,g, or c
  SITE (694): n equals a,t,g, or c
  SITE (695): n equals a,t,g, or c
  SITE (696): n equals a,t,g, or c
  SITE (697): n equals a,t,g, or c
  SITE (698): n equals a,t,g, or c
  SITE (699): n equals a,t,g, or c
  SITE (700): n equals a,t,g, or c
  SITE (701): n equals a,t,g, or c
  SITE (702): n equals a,t,g, or c
  SITE (703): n equals a,t,g, or c
  SITE (704): n equals a,t,g, or c
  SITE (705): n equals a,t,g, or c
  SITE (706): n equals a,t,g, or c
  SITE (707): n equals a,t,g, or c
  SITE (708): n equals a,t,g, or c
  SITE (709): n equals a,t,g, or c
  SITE (710): n equals a,t,g, or c
  SITE (711): n equals a,t,g, or c
  SITE (712): n equals a,t,g, or c
  SITE (713): n equals a,t,g, or c
  SITE (714): n equals a,t,g, or c
  SITE (715): n equals a,t,g, or c
  SITE (716): n equals a,t,g, or c
  SITE (717): n equals a,t,g, or c
  SITE (718): n equals a,t,g, or c
  SITE (719): n equals a,t,g, or c
  SITE (720): n equals a,t,g, or c
  SITE (721): n equals a,t,g, or c
  SITE (722): n equals a,t,g, or c
  SITE (723): n equals a,t,g, or c
  SITE (724): n equals a,t,g, or c
  SITE (725): n equals a,t,g, or c
  SITE (726): n equals a,t,g, or c
  SITE (727): n equals a,t,g, or c
  SITE (728): n equals a,t,g, or c
  SITE (729): n equals a,t,g, or c
  SITE (730): n equals a,t,g, or c
  SITE (731): n equals a,t,g, or c
  SITE (732): n equals a,t,g, or c
  SITE (733): n equals a,t,g, or c
  SITE (734): n equals a,t,g, or c
  SITE (735): n equals a,t,g, or c
  SITE (736): n equals a,t,g, or c
  SITE (737): n equals a,t,g, or c
  SITE (738): n equals a,t,g, or c
  SITE (739): n equals a,t,g, or c
  SITE (740): n equals a,t,g, or c
  SITE (741): n equals a,t,g, or c
  SITE (742): n equals a,t,g, or c
  SITE (743): n equals a,t,g, or c
  SITE (744): n equals a,t,g, or c
  SITE (745): n equals a,t,g, or c
  SITE (746): n equals a,t,g, or c
  SITE (747): n equals a,t,g, or c
  SITE (748): n equals a,t,g, or c
  SITE (749): n equals a,t,g, or c
  SITE (750): n equals a,t,g, or c
  SITE (751): n equals a,t,g, or c
  SITE (752): n equals a,t,g, or c
  SITE (753): n equals a,t,g, or c
acccctcctcggcctcccagtgaattgtttttaaaacagcctaattggtgtgtttatcactttagcatctgccttgtactaagtggttattcactaataattgtcatccttgccttattttttacagtcaactctctattttgggggtgctaatggtggtttggaacttaaccctgttcagggcctttcaaaagtgtataatgcctttcggcctttattttttgagatggagtttcgctcttgttgtccaggctggagtgcaatggcgcgatctcagctcactgcaacctccgcctcctgggttcaagccattctcctgcctcagcctccggagtagctgggattacaggcatgtgccaccaagcccagctaatttttgtatttttagcagagatggggtttcaccatgttggccaggctagtctcgcactcctgacctcaagtgatccacctnnnnnnnnnnnnnnnnnnnnnnnnnnnnnnnnnnnnnnnnnnnnnnnnnnnnnnnnnnnnnnnnnnnnnnnnnnnnnnnnnnnnnnnnnnnnnnnnnnnnnnnnnnnnnnnnnnnnnnnnnnnnnnnnnnnnnnnnnnnnnnnnnnnnnnnnnnnnnnnnnnnnnnnnnnnnnnnnnnnnnnnnnnnnnnnnnnnnnnnnnnnnnnnnnnnnnnnnnnnnnnnnnnnnnnnnnnnnnnnnnnnnnnnnnnnnnnnnnnnnnnnnnnnnnnnnnnnnnnnnnnnnnnnnnnnnnnnnnnnntgggtgtgatggcacatgcctgtaatccccgctactagggaggctgaggcaggagaatcgcttgaacccaggagacggaggttgcggtgagccaagatcatgccattacactccagcctgggcaacaagattgaaactctgtctcaaaaaaaaaaaaaagaagttc

SEQ ID NO: 519 - DNA, 2925 bp, Homo sapiens
ctcccgagtagctgggactacaggcgcccgccaccacgcctggctaattttttgtatttttagtagagacggggtttcaccgcgttagccaggatggtcttgatctcctgacctcgtgatccgcccgtctcggcctcccaaagtcctgggattacaggcgtgagccaccgcgcccggctgagatgggtattattaagaaattaagatgtggattaccagggtaagtcatatttcaatgtgcaacctctgcaagtccacagggtgtgatatggacattaaggagatctatggacgaatagcgtatgataccttgacaagttgacaaaatgtaaaatagttgaatggccatagaaaaaaaccagctttttagccccataggccgagggattcaggagggctggctacgggcattttggaatggaagatgttgtaccaacaaatcaagcttaggttcctggcaatttgcccacatataatatgtgaaagttcagatgtgaaataaatctgcggctaatagtaagaacctagccacaggagttaaaacttacggttctgggaccagatggactgccttctaatcttagtcttactacattttagcggtaaaaccttcagcaagttatttagcctccagcatctcagttttctcatctgtaaaatggtgataatgctactcttacattgggttgtagtaggataaaaggagaaaacgtatgtaaaggatttagtagaaacttattaaaattaagcaattattatttctcaattctaagattctaacctgcaaaaggcataaggcagctgctgagaacagggtgagaagatagggattcggtcaggaaaagtcttgtttccctgttgctgttggtggttttgtttgctcatttgtgtgttttttttattaatcattttcacttgtgtttattgacaagcttaatcaataatgccattgacatttagtaaaagtaaatttccttaagtgatctcccaggtagcaatgtttattcattatgtgtggagtagagataggaattattttattgctgcaaatattttattattggtttttcaagttttaaaagtaattttaattttttaatttttgtgagtatatagtaagtgcacatatttatggggtacatgagatattttgatacaggcatatgatgtgtaataatcacatcagggtaaacagggtaagcatcacctcaagcatttgtccttttttgtattacaaagaatctaattatactcttttagttatttttaaatgtacaataaattattgttgactatagttttgccactgcaaacaatagaaggcttcctgatacagcctcctagtcattggagttctatggcagaattcctaaagtttttaagtttcatgagatggctaaattttggtaaatatgatactttctttgaacagatgctacagaggccaatataaaggagtgtaacagagtgacacctgtgatcagtatctctccaactacaaagagtgtcccttaaatttcttctgtgtggttcctctttttttttttttttttttttgagacgaagtctcgctctgtcgcccaggctggagtgcagtggcgcgaacttggctcgctgcaagctccgcctcccgggttcactccattctcctgcctcaccctctcaagtagctgggactacaggtgcctgccaccactcccggctaatttttttttgcatttttagtgagagatggggtttcactgtgttagccaggatggtctccatctcctgacctcatgatccagccgccttggcctcccaaagtgctcggattacaggcgtgagccaccgcgctcggcctgtgtggctcctcttaagtaatactctgcttcgtccatataagcagaggtcagaactggctaagaatttctttatgtgtgtttatcctgatgttttcctactgtcacttttcttttcttatggattagcattgagggaatggtcagatggtgcctgcgtgagtctgattgaaacattttagcggcggggtgcgggggttgatggcatgtgcaatagtttaggatatttgagttagtggcagaatgtagacatgagggtgagtagagagtgcgtagcagagcaagcaattcaggaatctatgttggttaattacttttgttttgtggacattttattctacctgaaaagattatctaggaactacagaaattaatgacgtgtagtggaaactttgcacagtgtaagtgttatccatttacttctcttagtttccaatacaatgactctcctggtagctgtcatacatgataaatataatttcgttaataaaattatattttatataattgcgtactttaaacaagtgatcaatataactcagttataaatgtacagtaacaaagatcaatggataataaatacttctgcgttcattttcatggatacattctatttttgtttgtctcacaagcagtaatcagactatgaatcatgatatagctccataaacacttactttatagcaattcactgatatatgctccaccaaaaaaaattaagagacggatacaagcaatttaaagcttctgtgtgtgtgtgcatgcaaccgatgtgtatggcttttttttttttttttttttttgacacagagtgtcgctctgtcgcccaggctggagtgcagtggcgtgatctccgctcactgcaagctccgcctgcctggttcacgccattctcctgccttagcctcccaagtagctgggacttcaggcgcctgacaccacgcctggctaattttttgtatttttagtagagacggggtttcaccgtgttatccaggatggtctccatctcctgacctcgtgatccacctgcctccgcctcccaaagtgctgggattacaggcttgagcctcctcgcccggcc

SEQ ID NO: 520 - DNA, 268 bp, Homo sapiens
cggccgaattctgccctccgctaacgagctatagctttgtggaaatgggcgagtggcgtgcccttgtgagcctcagggccgcatctgtaaaatgggcataactgtcatgcctgtctttaagaacagccttgggggtaaatgagtggaactcatggaaagatctcagcccacaaccttccacagaacaggcgcttctcacacagtaagtagcaggagtgcagaggctgcaggcatgaatccagccagactgcctgggttcaagtcccag

SEQ ID NO: 521 - DNA, 102 bp, Homo sapiens
ttttttttttttttttttttgagacggagtctcgctctgtcgcccaggctggagtgcagtggcacgatctcggctcactgcaagctctgcctcccgggttca

SEQ ID NO: 522 - DNA, 5512 bp, Homo sapiens
tccctgtcggacatcgtggacacgcccgacttcctgccggctgacagcctcaaccaggtgtccaccatctgggacgataaccctgccccctccacccacgataaggtcagtgcgcccggtgcccccagccagccccgacccaccagcgtggcctccccagcccgggacccacacggtccagtgaggtctcagtctcccccactctgcgtgccaatggctgtgcctgtcactgtcggcgccatctgtggccatggatgaggtggttagttgagggtcctcttgtgtcctgaataggagaaggcgacgtccaggacatctgtggctaccacatctgggcggtgctcctggcatggagttggggggggccaggatgctgcccagcgccctgcagtgcccattatggccccacctgagagggaccctgccccgtgtccaccgcacccggggagtccctggtctagagaagcacaggaaggtgacgggacagagaagcgtggtcaggaagggccccctggagaggcagcgcccagcgggcccaggcaatgtggctgtccaggcagaggaacagcacctgtggtggcatccagccccatggtgcctgggtcagcagtggccgtgtccccgctagtggggagctgagagggcgaggttggtggatcctgtcccagggtggggagctggacattgtccgtgggggctgaggggctggggtttgcctccaagaagctcctgaaggacctgggtgggccaggcctagagcaggggttgtagggcagcagggcccccaggttcttcgggcctagcctctagccgtgccccagtgcgactcagtggaggtgtctggtgagggaggcatggctgggagccaggcctggcaagtcccttccccaatccgggcctgtccacgagagaagcttctagactttgggagcagacgttggacatgtctctgggactgagcgccttccggtgagggcccatgccagcctccgcacgctcccggcacagtggtgggctcacacccataggccgctctcccgggccctcaggaaggggcaacccgggcagcagaactcacgggcttgggggcccaggcaggaagcatcagggcaccccgcagccacggtgggtggctcacggtgggcggctcaggaagcatcagggcaccccgcagccatggtgggcggctcaggcttggtccctctggcacaagggcccagcagagcatttcacccagcccggggcccgtgccctcccagctagctcccaggtcctcagcagggcgtgaggaaagaagccagggcctgaccggcctgctgtggccggcacgagggcatctgaaacccaatgcccgccagccccaccgggaatggtgactcagccttccaggaacctgcgtggcgtctgtttttttgtgttttgttaacttaaaaaaaaaaggagagggcaactgagtataggtttctaaccttcctgtgccacgcttccactttctttaaaaaccctcaggagtgttcctagtgttagaaaatgcagaagctgtggactcagttcattagcatcactagcctggtggctcccacacactgccgagaacccggcccgggctcaggcaggcttgggcggaaacctcacccgtctcaggacgttggagttcaagggggggaccgggtctagaagagatgctcttatttatttatttacttatttattttgagacgggatctcactctgtcgcccaggctggagtgtggtggcgcaacctcagcccatttcagcctcgaccttctgggttaaagcgatcctcctgcctcagcctctcgagtagctgggtccatagacacacgacaccacgcctggctaatttttgtattttttgtagagataggattttatcatgttgtccaggctggtctggaaccctggccccaaaagatctcgcccgttctgcctctgcctcccacaggcctgagccacgcacccggcgggattctcccctttccaattcttcacacttttttttttctttttttaagacagagtctctcgctcttgtcgcccaggctggagtgcagtggtgcgatctcagctcactgcaccctccacctcccaggttcaagagattctcctgcctcctcagcctccctagtagctgagattacaggcatgtaccatcgtgcctggctaattttgtatttttagtagagatggggtttatccattttggtcaggctggtcttgaactcccaacctcaggtgatccacctatcttggcctcccgaagtgctgggattacaggcgtgagccaccatgcccggcccacgctcactttttttttttttttttttttgagatggagtctcgccctgtcacccaggctggagtacaatggcgtgatctcagctcactgcaacctctgcctcctgggtttaagcgattctcctgcctcagcctcctgatcagctgagattacaggcgcccaccaccacacctggctaatttttttttttttgtatctttagtagagacggggtttcagcatgctggccaggctggtctcgaaatcctgacctccactctgggaggccttggcctcccaaagtgctgggatttacgggtgtgagccactgtaccctgaccatgcttacgttttttatggctcgtattactgttaggatttttgctttttaagagtggatatattccagaatcacacagaccctagtttggaccctaccatcccccagccatccgtcccggggtccacactgtctcagtgttggcgtctggacagtgggcatgacgacgggccacaccaccccccgacccacccgttcacaggctttacacgcccagtcagttcggagacccctgggtgggccacagactcatccagaggcccagcacacctgtctgccaaggcctggggtcagctccccgaggacagtgtcactgcccaccctggtgaatctgcatgaggctccgggcagtccttctccccagggtggggccgcagtgggatgtgttctctggtcactacagtggcaggcatccttgccccatctctcacagaggaggtgctgccctcgaggggcctcagggactgcacccacgggggttcttggagagtgcagggctgccctgggccacccaccctgtgtgctgggagccatcgggtgagggacaaggcccaggcccgcccgcccccactgcctctgtctcctcttccccctcgacagggagctcccaaccccttgtctcccaggcccccgagggcctcctgcactgcatggggctggcacacagtgggtctctcctgtcagacccctgtccacagccttcctggcagctcccgcgggaccaagctgtgttgtctgtcagaactagccgggcaccttcctcccgggcactccaggcaggcacactggccatcagtgagaaggcagccaggtgctggccaggaggagcgagccttaggccccagggaggtgcccactggggaggcttgggaggcaccagggtcaccctgagaacagcaggagagcaagacccagggccctggggagcgaggatggggaggcgaggacggggcagtggggagcctccctctggtggccaggctgcgagggcccaccagctgtgacctgtcccgtctggcccgggctgacatcctgctccccttccagctgttccagctcagcaggccgtttgcaggcttcgaggactttctgccctcccacagcaccccgcttctcgtcagctaccaggtgagctgggcccagccgagagctccctcccctgccctctcatgggacctaaggagagggctcagcacaggcatctccattgtggggagcgcttggctggcctagaagctgggagtgcccattttatagctgaggagatggaggccctgggggagcaccttgctgcaggggcagacagagccgtctcccacccctgggtcactcagctgcccatggtcagcctggcccctgcccctgggggagcccagtgcccgcggccgctcaggcctgcagtctccgctgagctcccgccacgcacgcaggagcagagtgtgcagagccagccagaggaggaggacgaggctgaggaggaggaggcggaggagctggggcacacagagacctacgccgactacgtgccgtccaagtgtgagtggcccggctgcacccagccctgggacaggttcaaacccttttgtgggaccgagaccctgcaggtgaccaccgcccgcacagcccacagagggaatgtgaagcttcagggagggccggagagcccggggacaggttctacaatccaggcttatacaaaaccggggttcgcagaggggagaagtggaaaggaacctcagaggcactgggaggatttttatgcatttgcccctcctgcaagccgctggccacgcccccaaccaacccagcaggccgcggccacacccccgacccggccagccctgaccactcctccacccaggcattcctggccacgcccatgacccgcccaacgggacctggccacgcccccaaactgccccgccagctctggccacgccccagacccgcccagcgtgccataaccggccctggtcaccccttggccataccctttaccttgccctccgtccttgctcctccagccaagatcgggaagcagcacccagaccgcgtggtggagaccagcacactgtccagcgtcccacccccagacatcacctacaccctggccctgccctcggacagcggggccctgtctgccctgcagctagaggccatcacctacgcctgccaggtgaccgcatgtccccaacccagcccagcctgtgtccgcgaggcccctggggaggggccgggccagcacccccaggccctgacgcctgctctccggcaacagcaacacgaggtcctgctccccagcgggcagcgcgcgggctttctcatcggcgatggggccggcgtgggcaaaggccggacggtggccggagtcatcctggagaaccacctgcgcggccggaagaaagcattgtggtgaggccctgcctggggcagggggcgggagcgggggtggggggcggaagcggggggcgagggggaagggtgggcgcgcctgacgcccccaccccgcaggttcagcgtctccaacgacctcaagtacgatgcggagcgcgacctgcgggacatcgaagccacgggcatcgcggtgcacgcgctcagcaaggtaggggctgtgctcggcaaagtagggggcaaggtggggaccgtgccctgcaaagtgggggctgctcagctgggtgggccagcagccagggcaggctctgcccagcacccttacagatagggagacccaggtccagagcctgctgagccggggccccattccacacctgttctgtgcatccccagatcaagtacggtgacaccactacctcagagggcgtcctcttcgccacctactccgccctgattggggagagccaggccggcggcca

SEQ ID NO: 523 - DNA, 393 bp, Homo sapiens
cagactggccagaaacagaacgggagactgctggtgtcttcgcacccggctgaacaatctatgtgcaacaatctacgaaatagcgataaccctgagatcatacctcgctgagctgctacgtggcggcagggccggccgtttaatttgtattctcccagttttccttcctcagactgctttcctggaacttggctttctttcgtcttaaaatattaagaacctggccgggtgcagtggctcacgcttgtaatcccagcactttgggaggccgaggcaggcgaatcacgaggtcaggagttcgagaccacctggacaacatggtgaaaccacgtctgtactaaaaatacaaaagttagctgggcgtggtggtgcgcacctgtaatcccagctacc

SEQ ID NO: 524 - DNA, 90 bp, Homo sapiens
gtgaaaccccgtctctactaaaaatacaaaaattagctgggcgtggtggcacgtgcctgtaatcccagctactcgggaggctgaggcagg

SEQ ID NO: 525 - DNA, 1547 bp, Homo sapiens
atcaaaaaaacagctttgaactcccccttcaaaggaaacagtcgactttcataattagcatctaccattatccccaaatcttattttattcattgacttgaaattttttccaattgctttttttttttttttttaaggttaagagcagaggtttactaggccaaagaaagagaatagctctctgttgcagagaggggtcctggagaaatgggttaccccagttgtcttatttaaatggttacccatcagattttaattttatcttctctttgagagcttggtaataagaagcacttaaatcactccaaagaagactttaaaaagggagcagtgaaaaggtcttaataatttattgattgaattaagaaatactagctaattaagaatctgagtctaaacagcacagattttttctttctgcttttaaattgtgttttaaaaaaagagacagggggctgggcgtggtggctcacgcctgtaatcctagcactttgggaggccgaggcgggtggatcacgaggtaggagttaaagaccagccaggccaacatggcaaaaccctactaaagatacaaaaaaaaaaaaaaattagccaggcgtggtggtgggtgcctgtaatcccaggtacttggaaggctgaggcaggagaatctcttgaacccagaaggcgaatgttgcagtgaaccgagatcatgccattgtactctagcctgggtgacaagagcaagactccgtctcaaaaaaaaaaaaaaaaaaaaaaaagaagtagagacagggagacagggtctcactgtgttgcctaggccggtcttgaactcctgggctcaagtgattctcccaccttgacctcctaaattgttgggattacaggtgtgagacagtgcacctggccgaaatagctcaagtttctgaaaaacaaatctgaatctatttgttattcttagcgtcactggtctggctttcagaattaacatacaaggttgccacacctagttctgcccagctttatgtcttttattccagtattccaccaaagtttgttttcctgcattccagttctcaagtcttaagataaagattgtacttgacagtttagtatatccataaaactatttgaggtggttaaggttcttgggttcattttccttaatactttgctgaatattgtagattgtaggcaatgaaaaagtctactaaattaggaaaaccttgaataattaggtatcctaggtaagagcccctaaacatcgagcaatctgtgagtctgtaaagaaataaatattttttggattattcttatctaattccacccctgttggaagatgatttctttgttctttgcaactatggaagctgtgaaaatcatcacaagtgcctctgaaagcgagtgttaggttggttagagggtttaatattttctgcaatggtttgtaggaattttaataaatgtagtatattttctgagatgattttgtaaaagtactattttaaatatcaaatcaaccaataaattcacatttgtgttaggaacagaaatatggtttatat

SEQ ID NO: 526 - DNA, 2600 bp, Homo sapiens
ctttctatttcatggagcatgtggcagctgagtgttcgacttggaattacttctggcaacaagtcctggatcctgcctggcaccttctgtttgatgggtgcaacctgaccagagagagctggaaggccctggagcgggccagcttctctaagctgaagctgcagcacatccaggccccactgtcctgggagttggtgcgccctcatatctatggatatgctgtgaaatagtgtgagctggcagttaagagctgaatggctcaaagaatttaaagcttcagttttacatttaaaatgctaagtgggagaagagaaaccttttttttggggggcggtttttttggtttgttgttggttttttttttttttttggcgggaagaaagagttttgctcttgttgcccaggctggagtgcaatgacgtgatctccgctcactgcaacctccacctcgcgggtttaagcgattcttctgcctcagcctccctagtagctgggattacaggtgcccaccaccatgcccagctaatttgtatttttagttgagacagggtttcactacgttggccaggctggtcttgaactcctgatctcaggcaatccacccacctcagcctcccaaagtgctgggatgacaggcgtgagcaaccgcacccagcttaaggtttttttgttttgttttgagacggagttttcgctcttgttgcccaggctggagtgcaatgctgtgatctcagcttaccacaacctccacctcccgggttcaagtgattcacctgcctcagcctcctgagtagctggtattacaggcatgcgtcaccacgccggctaattttgtacttttagtagagatggtgtttccccacgttggtcagtctggtctcaaattcctgacctcaggtgatctgcctgcctcggcctcccaaagtgctgtgattacagacgtcagccaccatgcctggcctgaaaccttttttaggtaaagttgaattccatccttaaaagtttctgttatatcctatttagccattttctattgtctcccaaagaattcacatcaaaaaaacagctttgaactcccccttcaaaggaaacagtcgactttcataattagcatctaccattatccccaaatcttattttattcattgacttgaaattttttccaattgcttttttttttttttttttaaggttaagagcagaggtttactaggccaaagaaagagaatagctctctgttgcagagaggggtcctggagaaatgggttaccccagttgtcttatttaaatggttacccatcagattttaattttatcttctctttgagagcttggtaataagaagcacttaaatcactccaaagaagactttaaaaagggagcagtgaaaaggtcttaataatttattgattgaattaagaaatactagctaattaagaatctgagtctaaacagcacagattttttctttctgcttttaaattgtgttttaaaaaaagagacagggggctgggcgtggtggctcacgcctgtaatcctagcactttgggaggccgaggcgggtggatcacgaggtaggagttaaagaccagcctggccaacatggcaaaaccctactaaagatacaaaaaaaaaaaaaaattagccaggcgtggtggtgggtgcctgtaatcccaggtacttggaaggctgaggcaggagaatctcttgaacccagaaggcgaaggttgcagtgaaccgagatcatgccattgtactctagcctgggtgacaagagcaagactccgtctcaaaaaaaaaaaaaaaaaaaaaaagaagtagagacagggagacagggtctcactgtgttgcctaggccggtcttgaactcctgggctcaagtgattctcccaccttgacctcctaaattgttgggattacaggtgtgagacagtgcacctggccgaaatagctcaagtttctgaaaaacaaatctgaatctatttgttattcttagcgtcactggtctggctttcagaattaacatacaaggttgccacacctagttctgcccagctttatgtcttttattccagtattccaccaaagtttgttttcctgcattccagttctcaagtcttaagataaagattgtacttgacagtttagtatatccataaaactatttgaggtggttaaggttcttgggttcattttccttaatactttgctgaatattgtagattgtaggcaatgaaaaagtctactaaattaggaaaaccttgaataattaggtatcctaggtaagagcccctaaacatcaagcaatctgtgagtctgtaaagaaataaatattttttggattattcttatctaattccacccctgttggaagatgatttctttgttctttgcaactatggaagctgtgaaaatcatcacaagtgcctctgaaagcgagtgttaggttggttagagggtttaatattttctgcaatggtttgtaggaattttaataaatgtagtatattttctgagatgattttgtaaaagtactattttaaatatcaaatcaaccaataaattcacatttgtgttaggaacagaaatatggtttatat

SEQ ID NO: 527 - DNA, 518 bp, Homo sapiens
actatctcttgaacgtgaaaagttattgatgcagtgaggtcgaatgcacacctactgcttcctaagctctggaacatgaatctccttcctctgtcatctccccagaattggaacctccttaatccaaccatctcactattggtcagtctagtgattgagaaataggaaaagccacaggttgaaatgatgaaatgtcattacactgaaagataataccaaagtacaaagtcctaggcacagtcttgtcaattccctcttgtctaagtggtgtggcaaatattattgtcacttttcagagaaaactgaggtgtagagaaataaataaatgaagttttttacagtcattccacaagttactgagcaagtcttagaagccctgactccccaaaccacaaaatctcctttgataatcattgctgccataacaccttcttttactgctttcctccttgaatccagagaacacatatttataatcattttaagagcctgaggaaatgacttcagcctgtgcaaaa

SEQ ID NO: 528 - DNA, 518 bp, Homo sapiens; identical to SEQ ID NO: 527

SEQ ID NO: 529 - DNA, 628 bp, Homo sapiens
ccttcgcaactgaaaagctgatggagctggattccctgtttgtaaaggcatgaattcctggtggctccaccccattcccccagcgtgcatgtggggccttagtgggctgcaggcatgtttaggcaagcccctgtgcaagttcccttatctgcacaaaacatctcatgtaaccatttgtgggactggtcagaagttcttccgggacccttccctactgtctgcctaaagcaagctggctaactcctttcattggttcatttcacttatatacactccccagcaatctcatatacctccacagttctcaaataccacatatatacagatgtttccaaatctaaacatctatcccaggtctctcttctgaccccaaaccttcatatccagccgtctactcaacagtctcctggattgctcagaggcacctcttaacatatgtaaaccagagggcaacactgacctccccaaacctgcctctcctcctttatgctgccctatcctatgaagattttttttaaaatcagggccgggcacggtagctcacgcctgtaatcccagcactttgggaggcctagacaggaggatcacttgagctcaggagttcgagaccagcctgggcaatgcggcg

SEQ ID NO: 530 - DNA, 467 bp, Homo sapiens
cataactcagatttcaaaccatttcagtgacctatccaagaagaaatattttagaattgctgtcattagatttttagttagtactccattttaatgtgtcattaaacaaattttaataaagttgattgaaattagagaatagacttttgtttccgaaaggctataaatcacatagtaatttagcttcaagctcaaatatgatagacatataattaaaatgatttaaaataaactcatcccttcaattatttctttccaagtaccattgcaccctcattcttctaggcaaagagaggaagttatctacctcagttacattctgatatttctcctccttctagaacacttctccaagagaggagagtatggcctagcagttggtggtgtatcttaagcaaaaaggaaaaaaacaaactatatattgttcaatctgttagcactgtgttgctcagaaaaatgaaagttaa

SEQ ID NO: 531 - DNA, 563 bp, Homo sapiens
ttctttttttgttgtttttttttttttttttattatactctaagttttagggtacatgtgcacattgtgcaggttagttacatatgtatacatgtgccatgctggtgcgctgcacccactaatgtgtcatctagcattaggtatatctcccaatgctatccctcccccctcccccgaccccaccacagtccccagagtgtgatattccccttcctgtgtccatgtgatctcattgttcaattcccacctatgagtgagaatatgcggtgtttggttttttgttcttgcgatagtttactgagaatgatggtttccaatttcatccatgtccctacaaaggatatgaactcatcattttttatggctgcatagtattccatggtgtatatgtgccacattttcttaatccagtctatcattgttggacatttgggttggttccaagtctttgctattgtgaatagtgcctcaataaacatacgtgtgcatgtgtctttatagcagcatgatttatagtcctttgggtatatacccagtaatgggatggctgggataattcttga

SEQ ID NO: 532 - DNA, 206 bp, Homo sapiens
ctaattcagaagagagaacctgcccgaaagtgtgcatcatctcagatttgcttgagcttcttgtgttcttagagacagtgagcctcctcaggacatcattgttaattaactgctggtgattaaaaccacaggattctagtaattgacagagccaacaacaaacaaacagcagttttttttcagttacagcattttgatatttaaaa

SEQ ID NO: 533 - DNA, 207 bp, Homo sapiens
ctaattcagaagagagaacctgcccgaaagtgtgcatcatctcagatctgcttgagcttcttgtgttcttagagacagtgagcctcctcaggacatcattgttaattaactgctggtgattaaaaccacaggattctagtaattgacagagccaacaacaaacaaacagcagtttttttttcagttacagcattttgatatttaaaa

SEQ ID NO: 534 - DNA, 520 bp, Homo sapiens
cgacctaacattttcacatctcacatgtaagctgtgagttctttgaggacaagctattttactacttctgcttttaaggcttggttggtacagtgtttattatatagaagatacttaacacagtttttaaaaaatagaaggatagaaacatcccagcatggcgagccttacatcttcacacaatcttccttttctagaaagtaacaatagattttaaaatagatttttccattaaaaaaaagaaactcaggatgagcacccatgtcacacctactgtggtagctacaataagaaagataacaaaaataggtgttgacaagaatgtagaaaaattgttgaatggtacagccactttggaaaacagtctgacatctccttaaagtattaaacataaagttaccatgtatgtaacccagcagttccagtcctaggcgtatgcccaggagaattgaaaacatgtccacacaaaaactctgaatgttcatggcagcatcattcgtcacagtcagaaagtgaaaaa

SEQ ID NO: 535 - DNA, 339 bp, Homo sapiens
tcatataccaacgcttttgttgagcttttcccagattcttgagcaggaattattttcatgctggggactttcttttgtggattttagctatttgtgtacctattgtattacacaaattaatcagtgtttccaaacttataggccatggtttgtggagctgtctcactgaatctgataatccgtagactcataaggatgtatgtatatatctatcatcttgggatgtcaagccttcgtaacccaaggcattttgtgttaaaattatacttataaaccgtggtagctactatgccaattgtaatcagaatcatctttttcaccttcttgtctattgctgta

SEQ ID NO: 536 - DNA, 339 bp, Homo sapiens
tcatataccaacgcttttgttgagcttttcccagattcttgagcaggaattattttcatgctggggactttcttttgtggattttagctatttgtgtacctattgtattacacaaattaatcagtgtttccaaacttataggccatggtttgtggagctgtctcactgaatctgataatccgtagactcataaggatgtatgtatatatctatcatcttgggatgtcaagccttcgtaacccaaggcattttgtgttaaaattatacttataaaccatggtagctactatgccaattgtaatcagaatcatctttttcaccttcttgtctattgctgta

SEQ ID NO: 537 - DNA, 2371 bp, Homo sapiens; identical to SEQ ID NO: 322
  SITE (1504): n equals a,t,g, or c

SEQ ID NO: 538 - DNA, 89 bp, Homo sapiens
accactcctggctaatttttgtatttttagtagagacagggcttcaccatgttggccaggctggtctcaaactcctgacctcatgtgat

SEQ ID NO: 539 - DNA, 238 bp, Homo sapiens
tttttttttgagatggagtcttgcactttcacccaggctggagtgcagtggcgtgatctcggctcactgcaccctccgcctcctgagttcaagcaattctcctgcctcagcctcccgagtagctgggattacaggcgcctgccaccacacccggctaatttttgtatttttagtagagacggggtttcaccatgttggccaggctggtctcgaactcctgacctcaggtgatctgccc

SEQ ID NO: 540 - DNA, 102 bp, Homo sapiens
caggcacatgccaccacgcccggctaatttttgtacttttagtagagacagggtttcaccatgttggccaagctggtctcgaattcctgacctcaggtgatc

SEQ ID NO: 541 - DNA, 101 bp, Homo sapiens
gggattacaggagtgtgccatcacacctggctaatttttgtatttttagtagagacggtgtttcaccatgttggccaggctggtctcgaactcctgacctc

SEQ ID NO: 542 - DNA, 146 bp, Homo sapiens
ggattacaggcgcccgccaccacacccggctaatttttgtatttttagtagagatggggtttcaccatgttgaccaggctggtctcgaactcctgacctcaggtggtctgcccacctcagcctcccaaagggctgggattacaggc

SEQ ID NO: 543 - DNA, 105 bp, Homo sapiens
ggctaatttttgtatttttagtagagacaggatttcaccatgttcgccaggctggtctcaaacccctgacctcaggtgatctgcccgcctcggcctcccaaagtg

SEQ ID NO: 544 - DNA, 100 bp, Homo sapiens
gcccggctaatttttgtatttttagtagagacggagtttcaccatgttggccaggctggcctcgaactcctgaccttaagtgatctgcccacctcggcct

SEQ ID NO: 545 - DNA, 93 bp, Homo sapiens
ccacacctggctaatttttgtatttttagtggagagggggtttcaccatgttggccaggctggtctcaaactcctgacctcaagtgatctgcc

SEQ ID NO: 546 - DNA, 201 bp, Homo sapiens
ttttttttttgagatggagtctcactctgtcacccaggctggagtgcagtggcgtgatctcggctcactgcaagctctgcctcttgggatcacgtcattctcctgcctcagcctcccgagtagctgggactacaggtgtctgccaccacacctggctaattttttgtatttttggtagagacagggtttcaccatgttagc

SEQ ID NO: 547 - DNA, 90 bp, Homo sapiens
tgcccggctaatttttgtattttgggtagagacggggtttcaccatgttggccaggctggtctcaaactcctgacctcaagtgctctgcc

SEQ ID NO: 548 - DNA, 106 bp, Homo sapiens
caggtgcctgccaccataccgggctaatttttgtatttttagtacagacggggtttcaccatgttggccaggctggtctcaaactcctgacctcaagtgatccgcc

SEQ ID NO: 549 - DNA, 106 bp, Homo sapiens
cccggctaatttttgtatttttagtagagacagggtttcaccatgtttgtcaggctggtctcaaactcctgacctcaggtgatctgcctgcctcagcctcccaaat

SEQ ID NO: 550 - DNA, 98 bp, Homo sapiens
ccaccatgcccagctaatttttgtatttttagtagaggcaggatttcaccacgttggccaggctggtctcaaactcctgacctcaggtgatccgccca

SEQ ID NO: 551 - DNA, 32 bp, Homo sapiens
ttttttgtatttttagtagagacagggttcca

SEQ ID NO: 552 - DNA, 477 bp, Homo sapiens
tgtgccaccatgcccggctaatttttgtatttttagtagagacagggtttcaccatgttggccaggctggtgtcaaactcctgacctcaagtgatctgcccacctcagcctgccaaataaggtactcagtcttcagattgaaagtaagaagatgagttgataataggctctattctctgtattggcacgtcctacagatttgggtccctttgttgaaaatcatcatatcagatcttcatggggttttcccctcccccacttccccagttatctgctttgcaagtattccattgactgttgaaaaatataagcgagcttttcttactacttttcttcctacttttcttcctctgtaatacctgaggttcatttagatggtagctgtttacagagtcttacaacctcaaagttgatagagcatttagagaatctaaaccctcgttggttctcagcacattcccccttagcccctgactg

SEQ ID NO: 553 - DNA, 117 bp, Homo sapiens
tttttttttgtatttttagtagagacggggtttcaccttgttggccaggctggtctcaaactcctgacctcaagtgatccacccacctcagcctcccagagtgctgggattataggc

SEQ ID NO: 554 - DNA, 96 bp, Homo sapiens
tttttgtatttttagtagagacagggtttcaccatgttggccaggctggtttcaaactcctgacctcaagtgacctgcctgcctctgcctccctaa

SEQ ID NO: 555 - DNA, 122 bp, Homo sapiens
cccggctaattcttgtatttttagtagagacagggtttcaccatgttggccaggctgctctcaaactccagacttcaagtgatctgcccacctcggcctcccaaagtgctgggataacaggt

SEQ ID NO: 556 - DNA, 104 bp, Homo sapiens
ctgctaatttttgtatttttagtagagacagggtctcaccatgttggtcaggctggtctagaactcctgacctcaagtgatctgcccgcctcagcctcccaaat

SEQ ID NO: 557 - DNA, 129 bp, Homo sapiens
ccaccaagcccagctaattttttgtatttttagtagagatggggtttcaccatgttggccaggctggtctcaaattcctgacctcaagtgatctgcccacctcggcctcccaaagtgctgggattacag

SEQ ID NO: 558 - DNA, 91 bp, Homo sapiens
gcctggctaatttttgtagttttagtagagacagggtttcactatgttggccaggctgatctcaaactcctgacctcaagtgatccaccca

SEQ ID NO: 559 - DNA, 97 bp, Homo sapiens
gtgcaccaccatgcccggctaatttttgtatttttagtagagacggggtttcaccgtgttggccaggctggtctcgaactcctgacctcaagtgatc

SEQ ID NO: 560 - DNA, 100 bp, Homo sapiens
gctcggctaatttttgtatttttagtagagacagggtttcaccatgttggccaggctggtctcaaacgccttacctcaagtgatcagcctacctcggcct

SEQ ID NO: 561 - DNA, 50 bp, Homo sapiens
cacgcccggctaatttttgtatttttagtagagacggggtttccccatgt

SEQ ID NO: 562 - DNA, 127 bp, Homo sapiens
cctgccatcacacccggctattttttgtatttttagtagagacggggtttcaccattttggccaggctggtctcaaactcctgacctcaaatgatccacccacctcagcctcccaaagtgctgggat

SEQ ID NO: 563 - DNA, 86 bp, Homo sapiens
tgcccagctaatttttgtgtttttagtacagacggggtttcaccatgttggccaggctggtctcaaactcctgatctcaagtgatc

SEQ ID NO: 564 - DNA, 108 bp, Homo sapiens
cagacacccgccaccatgcccagctagtttttgtatttttagtagagacagggtttcaccatgttggccaggctggtctcaaactcctgacctcaggtgatccacccg

SEQ ID NO: 565 - DNA, 86 bp, Homo sapiens
cacccaccaccatgcccagctaatttttgtatttttagtagagacagggtttcaccatgttggccaggttggtctggaactcctga

SEQ ID NO: 566 - DNA, 68 bp, Homo sapiens
tggccagctaatttttgtatttttagtagagacggggtttcaccatgttggccaggatggtcttgatc

SEQ ID NO: 567 - DNA, 89 bp, Homo sapiens
ccacaccaggctaatttttgtatttttagtagagacagggtttcaccatgttggccaagctggtctcgaactcctgacctcaggtgatc

SEQ ID NO: 568 - DNA, 107 bp, Homo sapiens
tgcctggctaatttctgtatttttagtagagacagggtttcaccatgttgtccaggctggtctcaaactcctgacctcaggagatctgcccacctcagcctcccaaa

SEQ ID NO: 569 - DNA, 477 bp, Homo sapiens; identical to SEQ ID NO: 552

SEQ ID NO: 570 - DNA, 207 bp, Homo sapiens
tctcagctcactgcaacctccgcctcccaggttcaagcaattctcctgtctcagcctcccaagtagctgggatcacaggcacccgccaccatgcccggctaatttttgtatttttagtagagatggggtttcaccatgttggccaggctggtctcgaactcctgacctcaagtgatccgcccacctcggcttcccaaagtgctgaga

SEQ ID NO: 571 - DNA, 109 bp, Homo sapiens
ttcaggtgtgtgccaccacacccagctaatttttgtatttttagtagagacggggtttcaccatgttgatcaggctggtctcgaactcctgacctcaagtgatctgccc

SEQ ID NO: 572 - DNA, 95 bp, Homo sapiens
accatgcccagctaatttttgtattttcagtagagacagggttccaccatgttggccaggctggtctcaaactcttgacctcaagtgatccacca

SEQ ID NO: 573 - DNA, 477 bp, Homo sapiens; identical to SEQ ID NO: 552

SEQ ID NO: 574 - DNA, 221 bp, Homo sapiens
agacagagtcttgctctgtctcccaggctggagtgcaatggcgtgatcttggctcactgcaacctccacctcccaggttcaagcaactctcctgcctcagcctcctcagtagctaggattacagatgcatgccaccaggcccagctaatttttgtatttttagtagagacagggtttcaccatgttggccaggctggtctcgaactcctaacttcgtgatc

SEQ ID NO: 575 - DNA, 66 bp, Homo sapiens
tttttgtatttttagtagagacggggtttcaccatattgaccaggctggtctcaaactcctgacct

SEQ ID NO: 576 - DNA, 411 bp, Homo sapiens
gtagtgcttgctaataccatacagtcctacacttgaaagaatccttgatcctaaattacattcaactcagatatctggttagcaaaatagatagaaaaaaaaaaggagattcctgagttattcctaatagcagtaccataatgtgcataataaaatgactttagttgcaatatcttgaaagatcataagatgggggtgttgctccgctagagaaagagaaattcatgtttatgtgattatccatgcagacttgatctgcccaaggcaagaatgcatgtatttaataatcataaatttgttcattttcactgtacagggtaagtacaggccaccctgtaactgctactggtaatgactttatgtcattttttgtaagttatgtgatattttaaatctctctttcttttgccc

SEQ ID NO: 577 - DNA, 131 bp, Homo sapiens
tttgttttttgagatggagtctcgctctgtcgcccaggctggagtgcagtggcgccatctcggctcactgcaagctccgcctcccgggttcaagccattctcctgcctcagcctcccgagtagctgggact

SEQ ID NO: 578 - DNA, 105 bp, Homo sapiens
tttcttttttttttttttttttgagacagagtctcactctgtcgcccaggctggagtgcagtggcatgatctcagctcattgcaacctccgcctcccgggttcaa

SEQ ID NO: 579 - DNA, 472 bp, Homo sapiens
cccatgctaggggggcctgagactccctgtgaaatgcagctagctgaggaggccatgttgatccgcccccacggaaaaccgggagcctgggtgctgcacttgcctctctgaactagaactaattgttcttaaagatctttccaaataccaatgatgcacaatatttggatggttcaccatattgttcaccatatttaaactgtcagaaccttaaatatctgagcaaaacctcagcaaacaaaggatattttggggacttgttatgtgtgttgcacagcacagagatttgtagtctatacgacttccaaatcctgtaaacgaagtatttcagtgttgtcattttcagctatagaccgtgctacgatcattgccttttcttttgctattaagagatggctcattcataaacattcctacaggttgtgtggcaaacgcaaaataggccctgcgtgattacactggctctgattga

SEQ ID NO: 580 - DNA, 471 bp, Homo sapiens
cccatgctaggggggcctgagactccctgtgaaatgcagctagctgaggaggccatgttgatccgcccccacggaaaaccgggagcctgggtgctgcacttgcctctctgaactagaactaattgttcttaaagatctttccaaataccaatgatgcaaaatatttggatggttcaccatattgttcaccatatttaaactgtcagaaccttaaatatctgagcaaaacctcagcaaacaaaggatattttggggacttgttatgtgtgttgcacagcagagagatttgtagtctatacgacttccaaatcctgtaaacgaagtatttcagtgttgtcattttcagctatagaccgtcctacgatcattgccttttcttttgctattaagagatggctcattcataaacattcctacagttgtgtggcaaacgcaaaataggccctgcgtgattccactggctctgattga

SEQ ID NO: 581 - DNA, 738 bp, Homo sapiens
tagctgctttgatccttcctcccaatctctccctctagcttgttaattacatttctcccccatgaattccttctgtactggctttgtctatccagtcagaggagctgagaatgggaatctaaggccactcagtgggaggtcttctttgtcccccaacacagatagctcctctcccttctgagaagcctgaaaaccctggcattctgtcttagcagaaaagtaaaaataataatttttgttaaatggtatattatgataaaacagctgttatcctaatgcttggcatttgccaggaactctgggtatgtttatgtatataaaatcacatttcatccccgcaacaatcccatgagataaatattattgttattaatccctgttttacaaatgcagaaactgaggtacagagaggcttagtaacttacctcagtcacacagctgaaaacactagaatctcggactttcacctaggtctctctgactccagagcagcactcagtgttttgcttcctgggtttgggctttttggtgaagaggaaaaaaaaaaaaatggaaaaagtccaggtcattggcttttagcccaccaaaaaactaaccaaccaatcaactctgaggtaattgtcaactctttaccctccgtgtagaagaggctttctcaattgaaattataaaactggcacagaagcaaactggcgtggtgcacggggtatctgggcagttggaaatcttctagaaaaa

SEQ ID NO: 582 - DNA, 534 bp, Homo sapiens
aattaattgtgcccctttcactctcaaaagtgtcccggtttggacaataaattatgtggtcaccctacttatacagggtcctcccaacccagggacaatggcattttaatagaggaccctgaaagacagaattgtctttaagactcaaagaagtaaatcccagatggtgaaattttaagcgtttatatcccagtaggcaagagaatgtagacaaagattctgctcagcaccccacaaacctaccacaaaggactatttctaacacccgatttgagggttgtgggggtcaccaggcctgtgatgagatttgaaagggcaggagtcccactgtggctcatggaagtgtctgacaagcaaggccagaaaaggggagggacagcaaaaagctgttgcttccccacctccccaggcaagagggaagcccctgcctagcatttgattgttctcaagcccccagcctccctgcaggaaagagctaatggggattggccctcttcccagcgtcaccctcagcccctggtgggcccctgggct

SEQ ID NO: 583 - DNA, 1182 bp, Homo sapiens
cttaaggctgttaaaatgcttggagggtgaaaaggttgaaactattgattcattagatgctttatctccaatttgcatctcggctttttccatcttcacgggcatgggtggcgatagctggcaagattccttctgtagtgagaccatttagatgttcgaattgggtatggacaaatgaggtcactttgagttccccattacttctcggaactgccttcaggacacttaccccaaaaacccacacctctgcaaaaacaaagaaatacctcactccagaccaaacaaaagccagaggacagatttagctgcctaggatgtcagacaagaaatttgggggccatttaaagggaactaactgatgctgtgagccgtttaactcagatttggagatagcactgctgatatggccttattaagtagcaaacaggagaggaaaatgaaattgaggagtaaattaattggctgagcattaaggaagcccattgtcacgattgctgaggttctcccttgaattagcagtagactgcaggtttcatctgagtatgagccaccaaggcaaatcagaaacaaccgaacaaccaaaaacttaaaagtagcaattcccagtgcagaatccactccagagcagtccccgtctcaacacctggaagtcctaggcttggggctctctcatctcgcctgcttcccgatttgtttggaggtgacagtgtttttacctactgagcaaatgggaggatttgggttgtttaagattctctgggggctggacaagggcccttgtaagtctgtgtttgaagaagtggatgggctcaccaacaaaactccttcctgtgctgcctcttggcgtatctggccttggtcataggttctaagttgtttttcttttcctgtctaatgtaagtgggtgaaaaaaaaaaatcaattgagttgagtgccttttgaactgtgtgtctttttatttgcttgctttctctcaaagcagtagaaagtttcagctcactcagcaccagcagcttcctgggcatggaggtgggcagcaggttttgcctgggtcccctctgctgcctactatgcgacaggggctccaagggccgtgggaatgggtctcaccagaaggcgaggttctaggcaggtgtacctcatttggctgcatgcgtgtggttacagagcagggtccattgg

SEQ ID NO: 584 - DNA, 289 bp, Homo sapiens
ttaacttgggttaaaaaaacaaagttggatgtctgaaatcaaatattttcttcacccttgttgctcaagaatcagcatgtcgagagctgaactgggcctgctgcggggagaactttgtacgaggttaggagtatagaatgtgactggcgcaagacaaccccaaccacacctggttcctccaccccatgtgtcactttagacaggggtgtcctgttaccagcacctgtgctgagcagaatagaggccttgttcagttcctccccaccgccccccacctgtgtttgccatc

SEQ ID NO: 585 - DNA, 190 bp, Homo sapiens
gaaaccccatctctgcaaaaaatacaaaatttagcccagcgtgatcacgcacacctctagtcccagctactcagtaggctgaggcaggagaattgcttgaacccgggaggcagaggttgcaatgagctgagatcacgccactgcactccagcctggcgacagaatgagactctgtctcaaaaaaaaaaaa

SEQ ID NO: 586 - DNA, 486 bp, Homo sapiens
ttttttttgtttctcttactgttgtttatttataagacatttcctcccagttagtggaagttagatcgtaagaggctccagtgattttccttccacctcccctccctaatttctgtgcttcagcactctggaacactgtgaactcgacaaactaatcagagcagggagcttaacagccaggcctggacaccctcaagagactgtgtgctgattctcagtcgtcactccttggatcaggaaccatagtcctggtgagtggtgaggttccagaatttgatgtgtcaaggattttattcttggtgtctctaaggcaagcaggaaataaagggtgtttttaaaacaaacaaacaaaaaatacaattaaagaaatactaccaaacagtcaaatggaatgatgaagatttttagcgggcacaacttagagcactctacggacaatggcagagccttgaggctatgctcaggagcagcctgtaggcataggtt

SEQ ID NO: 587 - DNA, 486 bp, Homo sapiens; identical to SEQ ID NO: 586

SEQ ID NO: 588 - DNA, 347 bp, Homo sapiens
tgaaatgaaagctgaaagtttattttacatttccttacccatatacatctgtgcatctctgagggacaacatttaggaatatgtggtgggtcctcattactcctcttaaaaggactttaaagaaatattttactcgtgttcccgaagtctgttgctctccttctgttttccatgctgttttattctacatcatgtgacttgagattgctttcttccttctttatggccattactaccatttcctgatagttatcagtctccacctggcatcttcatctagatatggtttctctaagtctgttcagataccaagacttttttttatcagttgacttatagagcaattt

SEQ ID NO: 589 - DNA, 347 bp, Homo sapiens; identical to SEQ ID NO: 588

SEQ ID NO: 590 - DNA, 722 bp, Homo sapiens
ttcaggattcctgctgacctgtgtctctggatgagggagtcccatgccatcttcattccagaatcttattttcttaataagggtgattcagagcttaaggacaatgacacctagcaatatgtagcatggcatggcttagaaaatattctcatatccattttcacacactttgagaagtaggcagagaagatatgactgtcaatgaaaagggacttacctaaaaccacgtagcaagtttgcagcagagccaagactaaaaccagcccctatctttaggttaggtctcttgcacccaagcatacccccttcctctttcatccacctgcacctcctgtgcatgacagccccagcaatgaaggcctaggcaccataagttggcacgtgccctctgtaatagcaagctaaggtcatcctggggcaggggcagaggcaagagaggatggcagggagaattatgcatagcattgtcattttctgagtccccagtgtagctaaagaggcagcctaatgaagcagcttcttctggaaactccaaggactatgtcctggaagggaaagccaagccctcaggcagcactcaggggaagaacagatccacatatgcatagtgctccagctaggatctggccactcaggggttgtcacagaagatatgacagtcatatcttctctgcctatttctgagacacccccatggtcacccttatgggatactgcagccc

SEQ ID NO: 591 - DNA, 723 bp, Homo sapiens
ttcaggattcctgctgacctgtgtctctggatgagggagtcccatgccatcttcattccagaatcttattttcttaataagggtgattcagagcttaaggacaatgacacctagcaatatgtagcatggcatggcttagaaaatattctcatatccattttcacacactttgagaagtaggcagagaagatatgactgtcaatgaaaagggacttacctaaaaccacgtagcaagtttgcagcagagccaagactaaaaccagcccctatctttaggttaggtctcttgcacccaagcatacccccttcctctttcatccacctgcacctcctgtgcatgacagccccagacaatgaaggcctaggcaccataagttggcacgtgccctctgtaatagcaagctaaggtcatcctggggcaggggcagaggcaagagaggatggcagggagaattatgcatagcattgtcattttctgagtccccagtgtagctaaagaggcagcctaatgaagcagcttcttctggaaactccaaggactatgtcctgggagggaaagccaagccctcaggcagcactcaggggaagaacagatccacatatgcatagtgctccagctaggatctggccactcaggggttgtcacagaagatatgacagtcatatcttctctgcctatttctgagacacccccatggtcacccttatgggatactgcagccc

SEQ ID NO: 592 - DNA, 121 bp, Homo sapiens
ctattgtgaatagtgccgcaataaacatacgtgtgcatgtgtctttatagcagcatgatttatagccctttgggtatatacccagtaatgggatgcctgggtcaaatgggatttctaggtc

SEQ ID NO: 593 - DNA, 607 bp, Homo sapiens
tttatagcagcatgatttatagtcctttgggtatatacccagtaatgggatggctgggtcaaatggtatttctagttctagatccctgaggaatcgccacactgacttccacaatggttgaactagtttacagtcccaccaaatgtccaacaatgatagactggattaagaaaatgtggcacatatacaccatggaatactatgcagccataaaaaatgatgagttcatgtcctttgtagggacatggatgaaattggaaaccatcattctcagtaaactatcgcaagaacaaaaaaccaaacaccgcatattctcactcataggtgggaattgaacaatgagatcacatggacacaggaaggggaatatcacactctggggactgtggtggggttgggggaggggggagggatagcattgggagatatacctaatgctagatgacacgttagtgggtgcagcgcaccagcatggcacatgtatacatatgtaactaacctgcacaatgtgcacatgtaccctaaaacttagagtataattaaaaaaaaaaaaattaaaaaaaaaaaaaaaaaaaaaaaaaaaaaaaagaaaggatgtcaggaacag

SEQ ID NO: 594 - DNA, 487 bp, Homo sapiens
gtcgtaggcaaagttcgttctcggctttgggggaggctgtgaccagcggaacagaagggcaccatttccctgctccgaggcggctttgcgctcgcggtgccagaacctggggttatccgagcggcgtgggcgcgggcggcagccggcgccgcgagaagcgactctcagaaaccgcgggtctccagccccggggcagcgcgccaagagcgcagagtgggaaagtgaactgatcgcctaagcagcgggtggtcaacccgcgtgtcatgtccgggctctcggggatcccactctatccacctacggtttccctcccgacaccctccacggtcgccgctccacctgctcgggtacctgcccgggtctccccttgggcgctgcgcaccccacggcgcccccggcgggtgtcccggaggcaggttgtgtgcgcgtgcaaagtggtccctcggaaggcttaataataataatacataaaactctaggttcttac

SEQ ID NO: 595 - DNA, 436 bp, Homo sapiens
gcggccgcctcctcccactctgcgttctcgcgctcactgtgccctgcccgggctcgcaccttgcccgtgcccttcactcgctcttccgcgtgatttccccgccgtctttctctaccaactgggaatgctaaaacgggactgatggacgtgtccgaactctgcatcccggaccccctcggctaccacaaccagtaggtgccctgcttctcggtctgtctgtccttctgcccgtctggcagtctctgtcctggggatcgcagttccttttctgcacattcttgtgtaaaagtggaagggacttcgggggggcacttgggggacgaaggaggggaaaagccgcacacttctgggtttctttctagggcataaaccctcctctaactttttcccgcacccccttttacaaatccacactttcaggcaagagtggcgcttt

SEQ ID NO: 596 - DNA, 516 bp, Homo sapiens
gttgtaagtaaggcaatgcctggtgatgggttcttggggctcctggagtttgatttaataacaaatatttattgaccacatattgtcttgtactgtgagaggccttatgggaggtcaaaaggaattttgccctaatgatcttaataatctccataggacaaaaagtgcacatgtataaagtggaaaacaaggaaagcctggcagatgatggttaaatttatttgctgatcaatgtgaatgaggcagactaagaggtttctaccagaaggaacttgagcttcttgattcgagttagccatcaagtaacttgaggtgaccttgggcaaggctttcttactggtctcctatattggacgagggcccctcaagcccaagtgagaaggctgtttctattatctccttttcctcctatctccagtgggacacccagtcctgcgaattctattttgggaatgtttctagagtctgcccagtctcttcccagtccagtgctttctccatcccgtggccagggta

SEQ ID NO: 597 - DNA, 182 bp, Homo sapiens
ggtgaaaccctgtctctactaaaaatacaaaaaattagctgggcgtggtggtgggcacctgtaatcccagctacttgggaggctgaggcaggagaatcacttgaacctgggaggcagaggttgcagtgagccgagaccgtgccactgcactccagcctgggcaacagagcaagactctgtct

SEQ ID NO: 598 - DNA, 2693 bp, Homo sapiens
caagagattatgattttcccaaaatcagatgaaatttgtgttctttacctgctcttggatgctttacatgacacaaagttatgaaattataagtgttactatccagtcttctcattattattatctgagaatagatagtttcctttgcagaactaggtagctctcaagagaggcccagtcagcatattaaacagctggctccctgtagcagagaagctacccatgggaaataaggaactctgttgatggcgtgggactctttcctgtaataaggaccctgatgtaggggggtaggtagtaaacagggatgcatctgctagtatgctttctatgattgctattttgccatgtggagaggaggttccagcccatttgaggggcataggttttgataacagaatgctcttataagaacatcgctacctcttcatgataactatttacatcattctcttgccaaatagagtgaggcaacatttctactcttggtgtatttttatgtttgttcttactcttcacttacattattttcagctaatgatgatctacttaattttggaaggttagggtaggaagaaagagaaagtaggcccattaaaaacttcattttctttctaatattccttgttaaatctgtcatgatagtacttctcaatcgatatgaacaaaattgtttctctctacctgtatcaaggaaacaactgaaaatatcctaacaaattttggaagggagggtttttaaatgatttgatttaaaatatgggctatgtaaaacatgaaatctacttggaggaagggggattcaagacatcttaaaggaatgggcattcttttccgaagttgataataggctctatgagatattactcgtattaaaagtgcgccgtcatgtgtaatgaagatgctttcagttgcaattgacagaaaactctaccttaactgttttaaacaataagaaacttaccaactcacctaacaaagaacccagaggtaagacagttgtgattgtgttgtgataaaaaccgtggatcctcctttttgtaatattttattctagtctggcctttttccctgtataggttttatactcaggcttgatcccatcatggctgcgagatggcagtaacaatgctaggcataatatccaaaattaatttacaggtacaggaaagggggcatctctttcgtgtgtctcttttaagagtaagaaaattcttgtagaagtttctctgcattccttcatatactgttggccagaattacatcacatgctgagttgtgaagcagtcattaatgagggtgagagcacatgattgattcagacttatcaagatctgccggggctggctgcataattcccagggcccagtgcaaaatgaaaactcagggcccaaggtaggggtggggaagttaatcttcctttgtcatgggcccaccatctcaacccacagtggaggacaacccaagggattgctgcctgtgtgccaggatgcacagaggcacctagatgatggatgggcaagaggctaccactggtttgcccttataacacaccttggcaccatcagtttggggatagaatggccatcttctcactttgcagtgagattctacagagtaatgcccatcccctaacctggtggctgagaacctgtccttgagggatcgggaccgtgtgtgagcctagactaacaagccctgggtgcatgcgccattgtcccgtcctacttcacttacaaactcagatgcaaggataaaattattaagagtttcaagtcagtgaccacagattaataaacccaagcactgggcccttctgtgcatgaggccctgagtgactgcactggtcacatatttattctttccctgggattaggactgcagccagcctctcctgaaaaatatcagggtggctacatgaataaaatggggcatgccaggaagaaggaaatggaggtgggggggagtggtagatattaggttgggaatcagcaacatctgctatagataccatgaccagagaaaatacagtgctttggaatatgagtcctaaagtgaaagctacagggcatatgctctgacttcacactgactgacttcacatctgactccaggatgaatagcagcagaaatttattcatttgatattggttaagacttgtcctcaacaacatcttaaaggtcagctggtgtgatgtaaagtaaagctctgaaactcaaagttttacttcagatggcaaataacatttattcattaaattagctatattgataaagatgcttttagaatgttgtggaattatttttatttctagtcatctatccgaaggcattttgtaattgtgcttgtgtgtgtgtgtatatgtgtgtgtttgtgttacagtttaaaatcttactgtattacctacatcattgaaagaatcatcatgcagcctttctcaacaaaggcttatctagagaattataccctaatatcctaaagtatatttaatgaattaataaatatttaatgaattaacttactcattcctgggagaattgagaatagagtcattcaaatcattttctatggggttaaattctttggctgaacccgagttgagaaaggctgctagagaatgcattgaagaccaaagacttggttactgtttatgccaaacttcttaaagattaccaccaccataaaaacaaaa

SEQ ID NO: 599 - DNA, 2693 bp, Homo sapiens; identical to SEQ ID NO: 598

SEQ ID NO: 600 - DNA, 100 bp, Homo sapiens
tttttttttttttttgagacggagtctcactctgtcgcccaggctgtagtgcagtggcgcaatctcggctcactgcaacctctgcctcctgggttcaagc

SEQ ID NO: 601 - DNA, 90 bp, Homo sapiens
ttttttttttgagacggagtctcactctgtcgcccaggctgtagtgcagtggcgcaatctcggctcactgcaacctctgcctcctgggtt

SEQ ID NO: 602 - DNA, 24768 bp, Homo sapiens
atgttggactttctagccgagaacaacctctgtggccaagcaatcctaaggattgtttcctgtggtaatgccatcattgctgaacttttgagactctctgagtttattcctgctgtgttcaggttaaaagacagagctgatcaacagaaatatggagatatcatatttgatttcagctattttaaggtaatcttcctctatagcatttttattgttgtcttttctacaaaagcgtgttttctctgggaaccatgaaactctgtaaggttaagtaattatggaaaaagctaaagagaagagcttttcgactaaacttaatattagctactaacttgaaaataagttgaaagtattatgtcaaagccctaacacaatataattgtatttttaaaagataactttgatttttcacattgaagggccccatacttaaaagcatgctaatcttgggtccaattcaaattcatttctctcaaagggattttatatctaggcttctattatcttcactactttctgttgctctgctttaagtttgggatgtctaataacataagaacaaatttttaaaagactatttagaaattgtcaccaacaagtatgcttttattgacatttcacatgtgtttttttttctcagggtccagaattatgggaaagcaaactggatgctaagccagagctacaggatttagatgaagaatttcgtgaaaacaacatagaaattgtgaccagattttatttagcatttcaaagtgtacataaatatattgtagacttaaacaggtattgatctatttaggaatagcttattctggtagtaaatagtggagagggaaaaggacacatagcaacgtgtaaatctctctgagttactacaaaatttcctaatttagtttatactgtatatagttgtcttttcctacctgtggcactggtcatcttaagaattttgaagttttactataatgtcctgctcttacgaggtgttgtaataaacttagtttaactaagtcatatagtttccaatcctgttatttattatcatatcctagtgtattatatgtgaaaagtgggaaaaagaacttatctttatcattaactttctgtctcttaatacacttcttaagaattcattactcattaacttttagactagatattccatgttcttctgcctttactcctagatacttgtaattcacaaatcaggactagggaatatttcttttacttggaacagcgataaatatcaaactgtggccctaaatcagtttataagactgtattcttaagagcatgaaggaccatgaactagtggaaggccagaatgcctggcatcctgccttatcttttaaaaatctttccttctttaaagatgttaaagtttctattataaattaataacttgcactgtggttttatttctagatatctagatgatctcaatgaaggggtttatattcagcaaaccttagaaactgtgcttctcaatgaagatggaaaacaacttctagtaagtaataatgattatttaaaatgaaattcaagaatatcaaacatagtatcacttttttttcttttaagtcacaaatatatacgaaataccattctttaaagagaagcgaaatgagcttttaattatcttctaactggcaggtccatatctgagtttagaacatagactttgaacagaatttaaaacagttaaaagttatgtggaagttatgagcctcctcggtgtaagaattctgtcttctttactttttgcatcccagccatctgtcctgatacctagtacatactaaccatttaagaaatgctgattgaataagtgaatgattttatgatgaagaggtatacacaatattgggttgctattttggtgtcccaagcaacatagccaaaataggtcaactgaaaaattatcactatgaattaaaatctgttttacataaacttttcaaggcccattctgcaagaaggtaagagctccttggaggaaacctaccttttccttgaaatctaaaactttttgaagaagtgtgagcaaagcaatatttttcatgattaccgactttactccctaagaatgtataatctagtgattttggcttttgtcctcttctcttcttagtgtgaagcactgtacttatatggagttatgctactggtcattgaccaaaagattgaaggagaagtcagagagaggatgctggtttcttactaccgatacaggtattcctgggctaggactacacttccgaaacgctgctgtcggtaaaatgcagtgtatgtccccatattccttatactgtgaacagcagtaatccaagaatagataagaaagtatacgattcagccgggcacagtggctaacgcctgtaatcccaacacttttgggaggccaaggcaggcagatcatctgaggtcaggagtttgataccagcctggccaacatggtgaaaccctgtctctactaaaactacaaaaattagccaggcacggtggtgggcgcctgtaattccaggtactcaggaggctgaggcaggaaaatcgcctgaactcggcagccgaaggttgcagtgagcgaagatcatgccactacactccatcctgggtgacagagcgagactatgtctattttttcaaaaaaaaaaaaaaaaaaagtaagattcttatgtcttgtgagcatattgtaggtatataacaattacatatttcataatgattataaattatataatctatgtattacatatcaagtattctatatattatagattattagaagtatggattatgctgtccctaatgataactccaattttaaaaaggagtctgaattgtgaactttctttaccttgaggctaaatttcaaagaatcttagaaatctaatgaagattatttttgcttttgttgtttaagttttcaaatattactccttggcagatataaggaaataagtgtgctttctgttgtcatttcagtttgatgactttgaaaagttgtcattcagagtcaggttgaaagtgaattctctcccatgtttacatagaaacaaaaacaaatcaagcaacagcacatatccacaaatcatttgttgtgtttatgtatacagaactgtgattcttcaggaagtaaggtcttgaaaacaggagccaccttaaccaactttttaattttagtgtctaacgcacagattttcaattggttgaatgagctaaaaatggaataccaggtcaatgtcggagatagtcaagattcagagaagaaactgtcaagaaggaggagtcaggagcttgagctaaagatgtaaagagtagaattaacattttcaaacttaaaaattaggacaaatgtagacaaggagaagggggttctttggggacattatactattcggcaataccaggtactactgtgtcctcagcagcaaattagtcttaggctcctcaactagccttttcctttcagctgaagggagtgttctagcagtgttcattcatgtcagtttgaccaagctgttttaacatccatgtttttaaaaatgagatttgaatggcctttcctatatttctgagagtacctggaaaaacaaaaactatacacagtgtaaagaagaagaaaaaaatattttatgaagcccagttttgaaaatatggctttgtcccctttggttcaacaagctaattcaattagaattgtgagcatttattattgaagtgacactgaacacttccaagtcacagtcgtggcaaaagagatccttacagcaaatagcaggtcatatccaagtctaagattctttgaatctagttcatttctttcagagcttactattccacccggaaaaatcacagacctgtttattagatctctgtagaaggaacagcttgccaagaaaaaagttagatatattctactttaaattgacataatatttgtaaattattttttaatctgtaaaatgtcaggttcacattctttacccacaattttcaaatccaaagagctctgaaaaaatatatatacacgagtatacacacaacacacatgtacatatacatagtaattcatttggcagcaaaacctgatgtaagctgaaatcatttggagtcaaaacttgcctggaataggtgtgaggctatatatagtcttcacttatctcacttttgtaaatatttataaattttcctccagaattattcacttatgttgatcatgagatgccaattcagaccctgctggagtgttgtattgtgtatgatctatatgccatatgactcttactatttgaaaaatgctatattccgaaacaaatccactcctaaggattttggaaaagggattatggacctttacatagtatgaatacccatcttctaaacaggctttcaaaaatataattttgaggccgggcacagtggctcacacctgtaatcccagcactttgagaggacaaggtgggtggatcagttgaggtcagacatttaagaccagcctgggccagcatggtgaaaccccatctctactaaaatacaaaaattagccaggcacggtggcaaatgcctgtagtcccagttactcaggaggctgaggcaggagaattgcttgaacctggaggcagaggttgcagtgagctgagatcacgccactgcactccagcctgggtgacagagcaagacaccatctcaaaaaaaaaaaaaaaaaaaaaaaggttttatatacatacatagcgggactccatctcaaaaaaaaatgtatatgtatatatatatatatatatatatatatacacacacacacatatatatacacataattttgaatcttgaggatatattgaggatatagatggacctgtgatcatatctgaaactatattgagtcaaagtagaatggaattctactttattggacttttcagtttctaatatgtgtgttttgggtctttgtttcccattgtgaatatgactcagtgctgctcgatcttctgctgattcaaatatggacgatatttgtaagctgcttcgaagtacaggttattctagccaaccaggtgccaaaagaccatccaactatcccgagagctatttccagagagtgcctatcaacgaatccttcatcagtatggtcattggtcgactgagatctgatgatatttacaaccaggtgggaattaaatctattaagacctattaagacagtttaacagactgatttcacttccctctttaattactcctttccttccttctttcccaaaagagtaaaagcaggtagaaccttttaaaaccttttgagctacaccccaggatgataaaggaaagagggttattaattttgccagaatcatatatttcagggagaagatggaatttgagctattgggaagaagatgcattcttttagtcattcattcaagaaatggttgttgagtatgtgatacgtgcccattcacatgcgcaatgctggggacccatcaccgaagaagacaggccatgtccctgcccctactgagcttgtagcttaggaaaggcagatgacaggattatagtaaagcaagatgggtgttatcttagggtaagcacagggtgccactggagcatgcagcagtggcagcaaggtcacaacaggtgacaaaaggaaggtaagaggagtgccaggaaaggaggcagcctgagcaaggctgtgaagatcatgcagcatttgaaaatcgccccactccccttgccagtatgtgtagtagtcacttccttttaaaaaacgccaaataaaattaccatttgacttcattcttctgaagaaaacataattttagatgttatatatttaaatatttgtaaaaattataattagggagtaaagaggcctgtgataactgtggatatcatttatcacagaatgaacctgatctgtgcagttctttaggtagcttgttagttttttgtgtgaatatgttaagtataaataagagggtttttgttggtggtgttgttgttgttgttttaagacaattcaaaatcagaagctacccacagatgccaggtctccataataattgttgccattcattgagaattcagtccaaaccagccacaaaggaggttttgttcccataccattttctctgttcctcacaatagccctgtaaagtagatggcattatcccccatgttgctgttgagaagaataagacttggagagcttaaataatttccttaaattcctgttactaagtagcagaaccataacttgaatttggtctgtgtcaattcagagcatctcattcctgattgcctctcattccacgtccttctgaaggcaatgtgcttccatttcctccttgccccatgatctttattagcacaagggttaagctgtgattgtgctgtgtgtccaccccactctctgtcctgcacctcccccatccctggtcatgggtgatggaacagattctgtctccaggtaatttggaattgggcctgagaaacagtttctggattggagtttatccacaacatgcaaaattgggagtttgtgggcagcctcattctgccatgtatatggcgagtagcctggagggagagaaaaggtgggccaacacatcaaggggagaaagagcgaaggcattccggttcccagccccagccgcttcctgtggcctggccacatacctgcctgcaggtttcatgtgacatggctatgtctgcccttataacaatttctctcctttttgcttgtggtagctcaaggtgatatgtgctttgtgcatccaaagatttctagtacgtgaggggatgaacccctggggaacaccaacatttaaaaggcagaagatgaggactcagcaaaggagattgagaagagagagtggtatctaggaaaccagagaaggagagatttcattcctcagagaatttaagtgagagtcttaaaaagaagccgttgaattggatggttgtgaggtcatgagcgaccgtagggaattccactgggatgatgatggaggtcgaatttcagtgagttgaataataaacagaaagtgagaaaatagcaacagtgagtggagcctgtcagttctaagggttgtctccaacaggaaagatacaaaaatggagaagtggtgggagacacaggaatgggacttttttttttttttttaagaaaagacttagaattgcagcggtcaagggctggaagaagagaatattatggtgttaggaataagaaggaagaccttggcaagcaatggtacagtctgagaagggcttccagtgtccaggatcctgaaaggtgatgggctttggaaaaactgatgtgtcttacaaccagagagtttaatttgagcatgtctacgtgcaaatgttgccaacagctttctcggggtgtcgtcttgacattgcaggtctcagcgtatcctttgccggagcatcgcagcacagccctggcaaaccaagctgccatgctgtacgtgattctctactttgagccttccatccttcacacccatcaagcaaaaatgagagagatagtggataaatactttccagataattgggcaagtattgctaatttttttcctctacagtaaatgtgttagagaactaacttcccattcttttggcctttaacccacaggttgtaatgttgtaaataatgggacataacatcacttaggtaaacttgctctaactgtattgagaattttataattataacatgaaggaataaatgagtcagtaaaacttcctgaagaacccactagtctttttctaaaatggatactctcaagattaaatcatttattaaaatgtctcttgctttagctactgagattacaactaagttgtgtaagaatttatttattcttttccattttctgaatctaagatagccaaattcatctaatttgtcactttgtgaataggaatttcactttaataataaagttttacctataagctaactgtaatggggttactaaagtttatattattgcaaggatatgcttgtacctttgtaagcattgtttcatttaaaaatattcttataggaataaagcttgcttcataatatatatgaaatgaaatatatgaaaacaaagaggctttaacaaaatgcagggagttggattatattcgcatgtagcagattttgttctgcttctatatcggctgttgaatcacataaactatcgttatgaggggccttcaatttattggtagtatgagaacagcctacattaggaagtggtggttcctggccaactgtgaatcatattagtgagctcagagttgagcagccaagaggaaaacactgatagtgtggcttcaggttcctaagtttaataaagaagttttgaccatgatactataattaaagacatatttattattaagaaagaccaaaatccaattacatgaaacctgtaagatacacacctgaaaaaataccctagcacagtgaaaatgaagggattttaaaaaaagatatcccaggcaattgccaaccaataaaacaactggtgagaaaacattaatattacacaatagagaatttcaaaaagcaatgttaataggtgtaaagagatctttatacctattaacgtgaattaacaatcaggaacacttacttaacaatcaggaacacttacctatatatttggaaaatcttggtttttcattggaatggaatttaaacatggagtgggtattgccttctataactttagtattcaaccctttgccttgaagtgagtaggaatttaacaaattctgaatgtctcctctttcaggtaattagtatttacatggggatcacagttaatctagtagatgcttgggaaccttacaaagctgcaaaaactgctttaaataataccctggacctttcaaatgtcagagaacaggtaggttctaatctggggacattctctgataactgcaggcctagtttatgaagtagcaaataagctaagtagatttcccaaggaatttggaagataatcacttagataatttaatgcaatgattaataaaaggtgaattttataggttagaataagataggtaattgtaggttttgttatatagtatatgtaaattgaagattaggatcccaaggaagagtcagtaccctaagacaaagaagcatggcatatgccccaaatgacttagtttacttttgcttaaagactatattctcatggccagagttggttgtaccaatagctggaattaatatgtttttataagtaggatgaatgatgaagatgataactgaatatggataatatgtcctgtcactgtaatttaaatttatcatttgtgttgtgctaaataagcaacaagactcaagacattcatcttaaaggttaaacggttatattctatctcttttgttcttacacaaggcagaagggaacatccaagtaagtagaggaataaagataaaatcttggggagcatacttgatatttctaaatggttatgttcctcatcctggctcagttactgagtttcctgtgtggataaaacaatattgactcaaaaaacttcatcatgttttattcaagtaaattgaattccataaataatgcacaaaataatttcaatgttggcacatctcctagaaatatattagagaaagtggcacttttatacttagcaacatcagatcattaatttttcattgctaaaatccctttctaaaattgcattttctcatttgtgacatttttaagaggtttcttgataccacagatttcaactaacttgatgaggttaatgatgtttaacatttgacttcctttaagtaaagcagaatgaccaaattttccaaaaagctggtttggaaattcatttttgatatactaaggtgtattttttgctaagctttcataagcctgtagaagaagtcttatattttaagtgtttctgctctgttctgccttctttgtcaacagtattagcaagaacaagcaattgaacttctgtctttattttctttttcatctaagttaataatagaagagttctgaggaaccacctggtccaagtctccgtttgaaatttgaagaaaccaatacacaggggttaagccccaagtcacaccaaagtttaatcacagccagaactaggatgtagtctcagaattctaagtccagtgcttttttcaaatatgttcaataagccagttgtctttgagcccaataagtatagtccatatgttattcatcttatatagaaatgttatctttgagccctagaactatagtccatatgtcattcatcctatatagaaattacataaaaacgttaatgtcggagccctataactgaagtccatatgtcattcatcttgtacagaaattatataacaatgttaaagtttgagccctataactgcagtccatatgtcattcatctaatagaaatgttatcttccagccctataactgtaatccatatgtcattcatcctatatagaaatgttactatttgtcagtgaattcatttgaatgtgatttatttacaagataaatgactttttaaatgtaatttaagtttcttattagtcaaggcaagcagatatgctactgtcagtgaaagagtgcatgctcaagtgcagcaatttctaaaagaaggttatttaagggaggagatggttctggacaatatcccaaagcttctgaactgcctgagagactgcaatgttgccatccgatggctgatgcttcatacagcagactcaggtaatgcacaaaaggggtggccgtttatattgctccacataaagactctcagaatcaggacctacttcacgatgcagagtggtttagcagggagagaggccttggatgagaatcaagttgctttttaaagttagtcattttttgtcaacttggataggccactagcatacctgaaaagctctcccctgtcaggtactgttaggtgctagggaataagaggatgtttatctctcatgttcaaggagcttgtcactgatcagaatggggggatcaaatgttgacatatgaaaaaatagacctgccgatctgtggaaggcagaataatgcctcccagcccacacccagagatgttcatggccctagttccctgacccaggtcgatatattacatgaaaaagggggattgaggttgcctattagctgacctttaaggagagggttctggattatcccactggactcactccaatcataacgctccgtcctgtgtgtggtggctcatacttgtaatcccatcactttgggaggccaagccaggaggagagcttgagcccaggagttcagaaccagcctgggtaacacagtgagatcccatctctacaaaaagtaaaaaaattagctgggcatggtggcacacacctgtagtcccagctactggggaggctgaggtgggaagatcacttgagcctgggaggttgcagctgcagtgagccaagatcatgctactgcactgcagcctaagtgacagagcaagaccacgtctcaaaaaagaataataaaataagagcccgcccccccccccactttttttttttttttaagacaggatctaaagttccccaggtttgagtgcagtggcacaatctaagctaaatcagacctcatgggctcaagcaaaacaacttccgcaatccccgcaggcagctgggactacaggtgtgagccatcatgcctggctaagttttttgtatttttttgtagagacagagtttcactgtgttggccagggtggtctcaaactcctgagcccaagcagtctgcccacctaggcctcccaaagggctaggattataggtctgagccaccatgcccagcctgtaaatataggggtccttaaatcaagaagagggaggtaaaagtgtcagaaccaaaaagatagcattgtgacaaaaacctgcctggccatagctggctttaaagatggagggggccacaagccaaggaatacaggcggcctttatctgctaaaacaaaaaaacagactttccccctaaaatgtccaaaaggagcccagcgcaaccataacattgattttagcccagggagcaccatctcagatttgtcacttctgggatggtgagagaataaattcgtgttgttttaagccactgagtttgtggtaattgttaaagcagcagcgggaaactaattcaaggtccaaggcagtaaacagacaccaggtgtgtcaaacagacagttggggggatttgagttcaaagtagagagggaaacattgcttgggataggggagcagaggaggtcaggaaaccccatacaggaatcaagagccaaccaagcgcatgatgaggtgttgaagcaaaaagcaaaagaaaatctacaccacacaaaagagggaataagcgaaacgattttgaaagtacaaaaaaacaaatgggccccactgagttgatgacctggctggaccagagggcttatttaaggtagattggatcttagctttttatgagtcatggtctcctccgagaccttctgttcacacagtttgaccatcaagttcagattgtgagaaatgcttcaacctctggtttaatggtagaaaaataagtaagttgaattaacatctctgagcttgttcagggctggcacagtttcttattcttcgtaaatgctggatcaacactaattaaccaatgcattccctcatccaggactgtatacccctacccctaagaggtgtgtcattcagcaggcctgtgaagccctctgctttttgtttttcactcaacaaactttccttgaggaccaactctgagacaggcactgtgtgcagcacttctttgttcttccagataagactgtgtctctttaaaaaactgtgcacacaagacttctctgtagccttcctttgtaacatggtagcccctgtctcacagctcttccagccaagatgacttcacagtccctctagctaccgtctgcttccacttcctatgggtggtccacagtgaaaacagcagttggacttcctcatccttcgtatctttgaaaatgtgtggagtttcccctcagccttctctccagcttcttaaacctttatcctgagagctgctttccagtttgtttcatcatcttgtttgttggcctatatccatttacaatttacccacagtatgaacacgatggctgaagtttttaatccctgaatctgtttttaattagttgagtttattttttacataaactccagttctaatttgaggattttactacattgactcagcttttaatcttctttaccaaaagtcttgcattcacaagcgtataaacaactcaagccctcactttatcctgtcataaaaccaactggggttttctagtgactcagcctcatcttcatcttctgtgtgactctgcctgacggccctgtctatgttcggaaagccggcagtctcctgaattcgcacccatgccagggacaaccttggcttgccagaggtctgtggttttatcttcagccacatttgtcttttgcgtttgtgcctggcaattgtctgacctgattgcacagggtcgtaatttatcagaaacaagtgattgacctatctgattgtgagtcacacatgggaaaagcaactgcttagttaacttttgtggaatttcagtcatggtgttcagaaaagcaggcctagtctcattgcctcctgttgagttgctggaggcatttcccagtcttaggatgcttgtacagaaccttgtaaagaaatattctctgaggaaataagggatgagaaaggctggctggctactgaagtttgaccccaaagttctgatggctctgcagttctctgggtatgaatccttaagggtcagatctgaaagagatggtcaggccctgggaaccccagaagcaaacctggtttataccaagaagctaaatgttaaagcacattgaggaatacagagtgtttgtccaacaactgggtacttaaacattccctatgcaaacatgaaagcagattaaaatcaggagatttctagtttaattaaaattagtataaagacaactggagctccttctgagtttgtttgatttttgtttagttaggtaaatatggagctgaaaattttcactttgtgtaatcagtgtcaccagttccaatatatttcttcccacatagttctggcaaattcatgaaaaatcagaactttgcagtttcccatgaaaactgagcctcttttccaggttgtcacgagtctcctcctgatggagtaacttagaaatcagcatataagatgaccttccacaggcttcatcataactaaagcaacaaatccacccatgacatatacatatatctatacaacattgttgttctgtacctgccagacatcctgagatattgatgggggcaggactaggaaggcaggagggggcacatgtaatactagtgtaactaccatataccttatacctatcagctgtgaactttttgacaaagtctgtttaagtcttagagtttttattttgactttatttgtcttagttcattgtctgctgctataacagaataccacagagtaggaaatgtataaagaagtttatttggctcatggttctggaggctgggaagtccaagagcatggtgccagcatctagcaagggtcaatatatgccggataggcagaagggcaagatagtgggtgcaagagagagctcacttttatagcacagccactgttggaataactaacccactcccaagataatggcattaatccattcatgagggtggacccctcataacacaattgcctgccaagggctctacctcttaacgctgactcaatggcaaccaagtgtctaacatgtgaacttttggaacacgcattgaaaccgcagcagtagctttgccttgtaagtattttgccttattctacttactctttcttagataagtaattggccttataaaccaatctaagcaaatatcaatattttttattctattcttttaacttggcgtttatttcatttgaaatggtttagcttggcagataggatcatctaagaattaggacatccagtatttttaccttgggtcaatcactgcctaattttgtgaccttggcctagtgcctgggtagtggatagttcagaaaactctgactgcctgccatgccctctggcctctacaagaagcaggatggccagaggtctgctgcttcttgtttgggggtccctcatctttgtgtgaggaacccttccttgttgtgtcgggcattccccacgaccactctggcttcagtgattcactacagggacacagaggactcagcatctagtagtactcacagctatgatttattatagcggaaggatagaaagcaaaatctgcaaaggaaaagggcacacggagtgaatttggaggaatgaggcacaagcttccgagcatcctctcccagtggagtcccacagggcacacttaattcccccagcagtgagtcatgacaatgcatatgaagtgttgtcaaccaggaaggctcattagactcagcttccttcggtttctattgggggctgcttacataggtagcctctgcccagcatgtaccaaaattccagacttccagaaggaaaacgttgtttgtacaatcatttaaggcttagtgagctgatcttgtgagttctcaaaatgatggcagctcttcgtgaaattcaagttcccagatgccagccaagagccaaccttgcaaacaggcctctctagggatagcagtccgttactgaatggcagggatcaatgtctaaagcaaaagcaactccgaacagacaggacgtgaggaagccacccagctatgaagtagtacaaggaggctctgcccattcgttttagacagttgctataaacaaaccgcagaatgctcacaaaatttggaaacactgttctgcagcttgctttttgtcattcaacaatctttcaaggatggcactccatgtcagattcaactgtcatttaacagtttaattgtactccatggcatagatgtactatatttcaccatcttttattgatatacattttgcttattactttttaaatggttaaaatgaaggaaaatatttaataatttatcttatttcatagatattttctacacatttagtaagcaggtaacacttttcctgtttctagcctgtgacccaaacaacaaacgccttcgtcaaatcaaggaccagattctaacagactctcggtacaatcccaggatcctcttccagctgctgttagatactgcacaatttgagtttatactcaaagaggtaaaaatatttgaatgaatatcaccacagtcttagcttttttatgcttaaaaatatttttaaaaaaaaagactaggattgcttgctctgtctctgattcaaggtacagatttgagctgttgagatagttcttatagttaaaggacaggaataaacatttaacaagcctgtagtgcctcctttcactggggatacagtgatggggaaaggtactcaagatggtagaggttatagcctaatggggaatatagacattaatcaaagaatcacactaggccaagtgcagtggctcatgcctgtaatcccagcaccttggaaggcccacgtgggcagatcacctgaggtcaggagttcgagatcagcctggccagcaggctggtgaaacctcatctctactaaaaatacaaaaattagctgggcatggtggcacacggctgtagtctcagcaactggggaggctgaggcatgagaatcacttgaacctgggaggcggaggttgcagtgggccaagatcgcaccactgcactccagcctaggcaacagagtgacaccctgtctcaaaaaaacagaatcacactaataaaaatgtaaatatgaactcagatatttgctctgaaggaaaggaatgtagttctccaggtacctagaataaagtatcctgttgcatcctggtagacttccatgagaagagacgcaagagcttctgaaggggcctggggaagggatctgttagtgttacgtagacaaaggtagggagcgtgatggagaacattccaaggacaggaagaatatcaagtcgtctttggtgaggaggaacataaacaattcaaagacctgaaagaccagttggctggaggagagagagtgagagaaaggtagtgtgaaatgaagctgaaaggtaggcaagagttgaacccaggagttcaaggttgtagtgagccatgatcaccccactgcactctagcctgggcaacagagtgagaccctgtctctcaaaaactaaataagtaaataacaataaacacaattacttgtataataataaataaataaataaaaataaacaattaaacttgtataataaaacaaagaacttttgcaggtaatctagttcattccccagtcattggagaaggtaatacacaaactgtccctgactgtttacgttagaattgcagacattgttgcctagaaggaaccatagagcagtggtcacaaatttaatctcacattaaaaatgcggatttctggccctattcaagaccgcctgaacgagaatctttgggggtgggccttgagaatctgaaaactttaaagcctcctggtggtgcttatgtgctgttggtgttggtgtgagaactactgttttggaggtggtctggctttgtccctgaatttctgcaaagtatcagtgcctgaggagatgacatcagggtcaatgttaatttatagtgtagcttcttatttaaaatttaaattgggtttcctcaagctctcttcataagctgcctagtctggatttttctcttaagtaaataaatattttctgttgcttcaacagatgttcaagcaaatgctttcagaaaagcaaaccaaatgggagcattacaagaaagagggttcggagcggatgactgagcttgctgatgtcttttcaggagtgaaacccctaaccagagtggagaaaaatggtaattactgaagaggaaatactggtgtgtttggaatgtgtgcacaggttatttgaaaccttggaaactggcaggttaaaaagactttatgttctcattattgtatcctatgatattccatctttagtgttgctaataaagatctgaaggttagttttggctgcgtctagctctctgctctcttgggcaatgttcatattcattttagagttcaggttttatatcttatctttgaaatgtgaggttatgctaaaccaggggttttggtaactccagttcatagacaagagtttagagagtcacagttggcctccatctccatggtatgcaaaactaatgtgtcagtttagtgatttggggaaaggggggaaaggatctataattctcatgatcttctcaagaagaatacgtcacccaagaatgtcataatctaccagcatagatgatatctaaaattcttctgattttgcttgattcttgttcacgaatgcacctgctatctagtagcagaagagggtactgcagactagttttgaaaaaacacaaactaaaattttactttaatgattttgatcctacttcttctaggaaattttatttataggaaagttctggcatcatttcaaattttttataaataagaaatttctaactgctcccaaaaaaccattctgaattttatggtgacaaactatttttttaacgcttaattttgttttaactatcagatctatttctgatgaagttaattatactgtagaattgcttagtagtgtagcttcttgtttaaaaactattatttttaatcagtatgagcttgtgattactgtattttagcttttgtttatttctttgatgctgagtggttggtcaaaaatatatttccaaattgtattattgttcctatagggaaaagccagccaacgtataacgatgtgatataaactagaaacatgttttgcaggtcaccatattgtgatatgaaacctgaagtctagaatgaatattatggttatcatattgtgacctgcaaaacaatcacgtgtaacaatctgacccggttagctgcctagaattagtgcattaatctctgtgatagtgtcttttaggcccttacaaataccaactttgtttcagagatgaaataacaattttacatttttttccagctgtatagtttaattacagcttaggacatactttcacagttttttctcatccttacaaccctgtaagatacacatcttaatccttattttatatataaggaaactgaggcttaaaaatgtaatcatttgctgaaggtacaaaggtggagagcctgggtctcactcatctcagaccccaaatttcatgctctttctactactccatcgctgcccctcagccctacaaaaatcttcaaaaatgagtgtttgtcatgccaattcttgaaataacttagatcgtaagtctttaaggccttttaataacgtgggaccaccccattgataaacaaacaaaaaaaaaactttaggggatcaacttggtgaggtaaagagcacagagtttttgaacctggacagataattgtaaatcctggctctgccatttagtcaccgtgtcaccctgtatagcattctcagtctctctgagcatcagcctctttatctgggaaatggctaacaatttccacctccctgtattgctatgaagatcaaatacttagaactttgcctgacacactgagggtaatcagagcatgtggacacccttctctttctctactgtatgaaatgtctgccggttcctaagtgcaaatggcaccccctgcattgttcagacatccctgtgactcaccagtcacaccttacacttctgtcatattggtctcttctttgccctccaagatatgctcttgtcattcttgccctgaagcctctgcctgtgtctgcctttcatctggatacaattcccttcttcatctctccgatgatccgatctttacttttcctcgcttctccagaaaattctccctggtaactagggtcatccttcagttcctttccaactcttctccactgccaccaccacctctacactttatagcatgcacttgagcctttagtatttgtctgccaagtgctgtagactaagctatttatgtagaaagtttattctactatgtcgcatgctccaggcatttttgtcgtttggaaaattcctagtgttaggcccacggttaaagctctgaagaactgaatttataaaagattatttagttaaattcaaagccacagctacaggaattcgaggatttcagtattttcttatttctgtattactagaaaaccttcaagcttggttcagagagatctcaaaacaaatattgtctttaaattatgatgattctactgctgcgggcagaaaaactgtacaactgatacaagctttggaagaggtaaggaaacgctttttaaatgcaggttcttggatcatgaatcacaccttatgacccacccagcagtctgttcctgtaaatatagctgagagactatttcatcagaagtaaaagcgatgtgaattaatatgtttcctgtaacgtatactgtcctaaatttggggaaataaataactagtatgaagagaatggtagcaaaaattacgatattgtaacttgaggaaacatgtaatcttagaaacataattataaaaataatatagaaacattgggcaaattgtgataaggaggtaaaagcaaaaacaaaattgcatgtgtataccatttttagggttgtaaaaaagtgtgtgccttgggggaaaaaaccagaaaggaatacacaaaaatgaaaataattatataatggtcatatgcttataagtgatatattttcttttctgaaaaaaatagtttattgtttttctttcaactcaaaaatgattgtaccaaaaaaattatacctcaccactcttaaattttaattgtgtatttaactagatttaaaatgataactaaaagcagcagaaaaataatcataaactctttttttttttttgagacggaatccagttctgtcacccaggctggagtgcaggggcacaatcttggctcactgcaacctccgcctcctgggttccagcgattgtcctgcctcagcctcctgggtagctgggactacaggcgcctgccaccatgcccagctaattttgtatttttagtagagacggggtttcaccatgttagccaggttggtctcaaactcctgacctcaggtgatccacctgcctcgggctctcagagtgctgggattacaggcatgagccaccgtgcccggccaactctattatttaaaacatcatttttactcataatctataaccctatccaattggtatgattatatatttttagagatataattaaaactgttttcactgggaatattttcttacaggctttttcttatttcagcaaggattataggatggtcgctataaacagcaacacagtaaaataagtctaccaaagtttctgtataccagaacaattgcacaccatgtattatttctactttgcttgtttggatttttttagtctataatatgatcgtaaacaactttgtaaatctcaaatgctttttatcatttgccttatttattttgtcatataacccaggcatcttcagttatatacattaaaatttcaagacattgtagaatcattgttttgtttttaaaagtgcatcaaaagaacttaataatacacaaattccaacacatggttgtgatatacacaataagcagcggaacattttctaatcctagaaacttgtgcattttttaatagcttggctcacgtttctgaaatttataatttgaaataaaaactttatcaagaaattgtcagaagtagtgtgctttatttgaagtgttttcaagaacaaatgagcaccatagagtccattcaggatttttaaattaagtatatttctgtaacacaggttcaagaattccaccagttggaatccaatctgcaagtatgtcagtttcttgccgatactcgaaagtttcttcatcaaatgatcagaaccattaacattaaagaggaggttctgatcacaatgcagatcgttggggacctttctttcgcttggcagttgattgacaggtaatgtaggcagcctgacatttgctgtagatgaaaggccctaggaacatcttcttaccgtttcttttctttttacagtttcacatccatcatgcaagaaagcataagggtaaatccatccatggttactaaactcagagctaccttcctaaaggtaagcaaaaaacagtgagattctctgttgctaggaaagagttggccttcattcatacctcattcattaattcagcccaggattttatccttttaggaaggtaaataatttcaatatttttatagactgaaattgttagcagtttttccacgagagcataatttaaaagattccagaaatatttaaagttttaattaatgtaagttggaatgtcttcaggaatactatttttaggtgaagaataaatttttttttaagttttatctgggtactaaaaatgtgagtcctttgggtcctttattccctaggcatgaattaagtccttttacttattattcaaaaatcgctgagcctatgctacaaactagtactaatatttacagtaacagggaatataggtgaacaacaggcacagtccttgctctcatggtaatttcagttcgtggtaaatgaacaaagagtctactcagggtcttcttcttcttccttttttttttgagagggaatctcgctttgtttcccaggctggagtgcagctcctcctcccgggttcaagcgattctcttgcctcagcctcccaagtagttgaaattacaggtgttcaccaccatgcccagctaatttttactatttttagtagagatggggtttcaccatgttgaccaggctggtcttgaattcctaacctcaaatgttcctcctgccttggcctcccaaagtgctgggattacaggtgtgagcccccacgcccagcctactcaatgtctcctgacagagctaccatgtaccatgtacatcaattctgagatgcacctttttttgggacgtgggagtgagggggatggggttttactgtgttgcccaggctgtgtctcaaactcccaggctcaagcgatcctcctgccttagcctcccaagtagctttaattataggcatgcaccactgcgcctagctactacaattcttttcatattttaacatttctgtaactggggatgggttttatcattgatggcatatcatagtttagttgtcagcatttaatttttttctgaatggcacataaaataatggcacttcttacacttgacggcatattagattggacagattcggtagaatctgtcaatcagattctatcagaacgtcaatcagaacgtcttgatttccacacaggagtagctcttttctgtggcacagtggctctcaaacttgagcatgcatcagaatcacctgcggggctggttgtaacacagattgctgggccgcacccccagggtgtctgactaagtcagtgtggagtggagcccagtaatttgcatgtctaataagttcccaggtcatgcggaagctactggtccagggagcacagtttaagaaccactgccatcacagttaacttgggtttttcaaaaactgtattgtcagaaactattaatgccctctgttgggtaaaacccaaatgttttgttgtatgttacattttctggaaagaaagatttctaggactctttttgaaacaagaaacagatataccttatttttcttccagcttgcctctgccctcgatctgccccttcttcgtattaatcaggcaaatagccccgacctgctcagcgtgtcacagtactattctggagagttggtatcctatgtgagaaaagtaagaaatgcatcagggtgatatttactcttgccagataactgctgttttaaatacaaaaagtatgcttaggccccccaaaagtatatccgtgtctctttcccttttaaaaatttgattccagaaatttgcaacacctaaaaataaacttacccttattgctactgtggatgtacagatgtttttacttgccaggaacttttatttctgtgttttaagtgttggtggtattcacatctattttatagatgtagaaacagagattataatagtttcttcaaaatcacagagccatatctggtaaaagagcctgatctagatccagcatctcccggtcagagcccagttcaggttttcatgggaattttgattctcgttttaataaattctgatggagcatggagccagaccagcctgaattcaaaatttactggtgtcgcattctagccagtcctctatagtgatgttacttaacatttttgaaccttgatctttttaaaatctgtaaaatgggaatgatacagtcttttgcagcatttttagaaggattagctttatattctgtaagcaattaatgtttaaaggaatggagccctgtgcctgccagcagttattaaaacagctcttttacatttttcagcatccccctatatagacaaattaggcatcctaatatttgtcagccaagaaaagtaaaacagatgttcattgcgtttcctgctttccttttcactgaaggttttgcagatcatcccagaaagcatgtttacatctcttctaaagatcata

SEQ ID NO: 603 - DNA, 518 bp, Homo sapiens
ggcgccggccaatcgaatggaagggggtggagccatgaagccacaccattggctctccccgacgcctgttagaccatccgaggcaaacgtgcccgcccacccccgggggccggatcagtggagcgccgagcacctagatgacattgccccggcgaggctccgggctccccgcccacgcgcagagctttccgctcgtcccagctgcacctcggtcctgcaggccgtccgcctggcgcagctgtagccatagcaactcacgcaggaccgcgctttacagtttaccaggcactcggacgcctttggcgcgagcgcccgtcgctccttcctcaggtcactgcggtgcaccgtgcgggtccgcgtcgtgtcctccgctccggagcagggaccgggcgtgctcgttcagtcctgtgcgcactcggaatggggccggggaaggctgagcctcagggcgaccctgatgtggagccgtgcgaccgctcactgcggttgaagagacccaggcgcagacagcgcaggcg

SEQ ID NO: 604 - DNA, 518 bp, Homo sapiens; identical to SEQ ID NO: 603

SEQ ID NO: 605 - DNA, 519 bp, Homo sapiens
ggcgccggccaatcgaatgggaagggggtggagccatgaagccacaccattggctctccccgacgcctgttagaccatccgaggcaaacgtgcccgcccacccccgggggccggatcagtggagcgccgagcacctagatgacattgccccggcgaggctccgggctccccgcccacgcgcagagctttccgctcgtcccagctgcacctcggtcctgcaggccgtccgcctggcgcagctgtagccatagcaactcacgcaggaccgcgctttacagtttaccaggcactcggacgccttgggcgcgagcgcccgtcgctccttcctcaggtcactgcggtgcaccgtgcgggtccgcgtcgtgtcctccgctccggagcagggaccgggcgtgctcgttcagtcctgtgcgcactcggaatggggccggggaaggctgagcctcagggcgaccctgatgtggagccgtgcgaccgctcactgcggttgaagagacccaggcgcagacagcgcaggcg

SEQ ID NO: 606 - DNA, 1547 bp, Homo sapiens
caccaatttctcgatgaaatcatccacagcttgcccagccttcaccaggaggatgatccgccggggcttcttcagcttggagaccatctctttcagggactgggcacccaccactttggttccctttgcctcattggccaagaaatcatcaactttggagacagtcctattaaaagcacagacctagaaggacaaaagtcctgagtaggagatccaggacacacaagactttcagactgtggccaaagtaacaatgacctttccattcaacccaagttctggggaggtcagacctgcctttgccttttcttcccccagctgtgggaggctcactgtaaagttatgtcacctcagtaggatgaaaacggcggacaaccgaggcgaaggccaactacccccggtgtgtcaggtagaatccacacccaacgtgttaggactcaaaatcaaatccaggaactggccggttcaacaggctctatctgttgttattgatcatcctggcgtctaagccactttaacatttagaagaaacattttcactctccccagatctcatcaggcaatcaagttagagctctacacagccagcaagggttctcctcccgcacccttcttctctacttaagacactaattcgttcattcgggctgtgaacctcacggacccacaggcacactccgcaggactaagttcgggatcggcccgcccacgcctacagggtgcttctcctttccatacaaaaatgccacgagcagcaacagagcacattagcaaagcacggccaggagacccgtaagctcccaaacctatcgccggcctcggctaaagcgcccgggaaccagagagaagacaacgcgcccacgccgcttaccacaaagccgtggtcattcatgttcagaattaagttctggcccatgacggccaatccgatcagcgcgatgtcagctctagagaggcagaaacagaacaaaggaaagagtcagcaccgctcgacgcgctgcaacccaggggtccggtccttccacatttggccgtgactgggagtctgcactttcctccgcgcctcccgcgggcccccagaagccgggcgcgcacgctgcagagcctcggccgggcaggcggcccccagccccgccctcgcgcccggctcccgctggcacgcgtcccgcaggtgtccctgcagactcggcgaggcctggccgcgcctcctccctggccctcgaagggacccgccccgccccatgcctgcgcggccgagagggcagggggccgggcccgcagggaaggagctctgggcccgagacgccgtagggccagggtcacagagccccaagtgagctcaggcgacccccagggtgggaggcgtcggagagaacgagggagatctcgacccccaaagagttccccgcccgctgaggccgagccgggctgcccctggcgagtcactcactgggccatggcggcggacagagcagaaccgaagagcggcgacgcgcggaggacgagtgagggaaagacccgcagcggctccctccagaaactgcggc

SEQ ID NO: 607 - DNA, 87 bp, Homo sapiens
caccatcttggccaggctggtctcaaactcctgacctcgtgatccgcccgccttggcctcccaaagtgctgagattaccggcgtgag

SEQ ID NO: 608 - DNA, 87 bp, Homo sapiens; identical to SEQ ID NO: 607

SEQ ID NO: 609 - DNA, 5254 bp, Homo sapiens
accacgcttctttgttccctcctggcatgagcgatgggccataccgggccccttcctctccaccactgactccgctccccacaaataaaattcccttggccttgaggtctcggcaccgtctctgaaggacagaaaaataatttcattatgcttccatgtttcattatgcttccatgtttcattatgctacccaaaaatgtttcccttataaatgagaggaagtataagataggaatggagagcctacatttacaggaaatgacccaaggatctaggaataactgatgactcaggaaagttaatcccctatgtgtaggagttaaaaaacaaaacaatacaactatggacattcacgatacctacctcatccccaaagtaaaataattaagccaaacacacattggcattttactggaaaagaccttgaataagactcaacgaagagtaggtgtaatacaacttaatgccattcagcacttcagagcacacaggaattccctcagcatttgataccattagaggagtggttctaaaccagttatagactgacatatcatggattacttggaaggggaaggggaggagttaaaacgtaattctcagcctgctgtatctgagttagtcatcctttgagttgtatgtgtgactgagaatctcacccaccaagtgtcttttttttttttttttttttcagatggagtttcactctgtcgcccaggctggagtgcagtggcatgatctcggctcactgcaacttctgcctcccaggttcaaacaattctcctgcctcagcctcccaagtagctgggactacaggcgcatgccaccatgccaggctaattttttgtatttttagtagagacgggttttcgccatgttagccaggatggtcttgatctcttgacctcttggtccacctgcctccgtctcccaaagtgctgggattacaggtgtgagccaccacacccggcccttctgttaagtgtgtcttaacagaaaaaaaggctgagaactattgtatcagtagtaatctcaaaaaaatcagtaccacagggcagttcaccctactgtcacatatgcgatgctgacacttttttctagaatgttctcggaacctggaagaatctggactgaagaacacttactgtggtgtccctatattcagaatttcctccgtcaatgatgatgtcaccagtatccaacaatggtacctgtaaccagacaccagcattaagatggaccaaaaatgaaacataccttggcaaattaaaacaaacaagaatttattccaaataaacatagtctaaaaagagtctcgttctgttgcccagcttggaatgcaggagtgcgaacatggctcactgaaaccctgaactcctgcagtggtgtgaacatgactcactgcaactttgaactccttgaaccacaatgcccagctagttttaaaattttttttgtaggccaggcgcggtggctcacgcctgttatcccagcactttgggaggccgaggtgggtggatcataaggtcaggagatcaagaccatcctggctaacatggtgaaacctcgtctctactaaaaatacgaaaaattagccgggcgttgtggcaggcgccttgtagtcccagctactcgggaggctgaggcaggagaatggcgtgaacccgggaggtggagcttgcagtgagctgagatcgcaacactgcactccagcctgggggacagagtgagaccccgtctcaaaaaaaaaaaattttttttgagatggagtctcaccatgtcgcccaggctggtctcaaactcctgggctaaaagcctcctggcttggcaggaggccaacgcacccagcctacttaatcttcaataatcctctctgtggccagagctgcacactatttaaaagtttagggctgaccaggctcagtggctcacacctgtaatcccaacactttgggaggttgaggcaggaggatcgcttgagcccaggaatttgagaccagcatggacagcatagcaagaccccatttctatttttaagtaagtatacagattaaacactgactataatgtgtctagaagagagtggggattcagtaaatacatatcaaatggtttagtgtatgaatgaatgattttatgacaacagttcggaggtcaggaagagacagagccttgaacatgaatatctacctacagcacaccaaccaggctgggctttattattattattactttattaattaattaattaattaatttatttatttgagacggagtctcgcactgtcacccaggctgcaatgcagtggtgtgatctcggctcactgcaagctctgcctcccgggttcacgccactctcctgcctcagcctcccaagtagctgggactacaggcacccaccaccacgcctggctaattttttgtatttttagtagagatggggtttcaccgtgttagctaggatggtctcgatctcctgacctcatgatccacccacctctgcctcccaaagtgctgggattacaggcgtgagccaccgcgcccagcctgggcttcattatattattcaatcttccccctacaaggctccagttaacattacttagtattttcctatactgaagaataatccaccatttttcagttttctctgtctgaaactgattacaggcagcttgccacacaaaaaatttagtatgtcctttttttaaactcagtgttcttcctttctaggtcatttgattgaaaaacagtggcatactggttacaaatccttctccctgtggaaacaaccccactgttgacacgactcctctagaaaggaatgctcagcctcccctgagctatcactgcactgcttacagcaaaacatttcttctaaatgggagtgcctgggttttttcagagttgttactatagaattattttgggtatctaaacacattatttccactggttcccctacttttttcttccaaaaaagatatacctgctaaagccaacaaattgtttggtacaaaaataagcatccagttccctaggattccctaaggagatcttgattttattttcattttttttttgagacggagtctcgctctgtcgccaaactggagtggcacaatctcaggtcactgtaacctccacctcccaggttcaagtgattctcattcctcagcctcccgagtaactgggattacaggcatgagccacaaagcccagctaatttttatatttttagtagagacggggtttcaccatgttggccaggctggtctcgaacctgggaccataagcttgtagctgggaccataagcttacaccaccatacccagctaattttttaattttatgtagagacagggtttcgccatgttgcccaggctggtctcgaactcctgggctcaaacgatccatctgaaccagcctcccaaaaagtgctgggattacaggcctgagccactgtgccccgccttaatgtttattgaaatgtctgttagtattctcagaattactaccaccaaaggacaaagttacttcataagcgcttatcaagttaaccaacactgcaacagttaagcaatcatttggtcagagcttagcagaaattgaaaaaaaaaaatctctagagttaaaagaaggagaactaaaggaagaaaccaaaaacagctgctatcgtggtagcagctgagagcacagctggcctcaccaatttctcgatgaaatcatccacagcttgcccagccttcaccaggaggatgatccgccggggcttcttcagcttggagaccatctctttcagggactgggcacccaccactttggttccctttgcctcattggccaagaaatcatcaactttggagacagtcctattaaaagcacagacctagaaggacaaaagtcctgagtaggagatccaggacacacaagactttcagactgtggccaaagtaacaatgacctttccattcaacccaagttctggggaggtcagacctgcctttgccttttcttcccccagctgtgggaggctcactgtaaagttatgtcacctcagtaggatgaaaacggcggacaaccgaggcgaaggccaactacccccggtgtgtcaggtagaatccacacccaacgtgttaggactcaaaatcaaatccaggaactggccggttcaacaggctctatctgttgttattgatcatcctggcgtctaagccactttaacatttagaagaaacattttcactctccccagatctcatcaggcaatcaagttagagctctacacagccagcaagggttctcctcccgcacccttcttctctacttaagacactaattcgttcattcgggctgtgaacctcacggacccacaggcacactccgcaggactaagttcgggatcggcccgcccacgcctacagggtgcttctcctttccatacaaaaatgccacgagcagcaacagagcacattagcaaagcacggccaggagacccgtaagctcccaaacctatcgccggcctcggctaaagcgcccgggaaccagagagaagacaacgcgcccacgccgcttaccacaaagccgtggtcattcatgttcagaattaagttctggcccatgacggccaatccgatcagcgcgatgtcagctctagagaggcagaaacagaacaaaggaaagagtcagcaccgctcgacgcgctgcaacccaggggtccggtccttccacatttggccgtgactgggagtctgcactttcctccgcgcctcccgcgggcccccagaagccgggcgcgcacgctgcagagcctcggccgggcaggcggcccccagccccgccctcgcgcccggctcccgctggcacgcgtcccgcaggtgtccctgcagactcggcgaggcctggccgcgcctcctccctggccctcgaagggacccgccccgccccatgcctgcgcggccgagagggcagggggccgggcccgcagggaaggagctctgggcccgagacgccgtagggccagggtcacagagccccaagtgagctcaggcgacccccagggtgggaggcgtcggagagaacgagggagatctcgacccccaaagagttccccgcccgctgaggccgagccgggctgcccctggcgagtcactcactgggccatggcggcggacagagcagaaccgaagagcggcgacgcgcggaggacgagtgagggaaagacccgcagcggctccctccagaaactgcggcc

SEQ ID NO: 610 - DNA, 87 bp, Homo sapiens; identical to SEQ ID NO: 607

SEQ ID NO: 611 - DNA, 1313 bp, Homo sapiens
atctttctaaatcattttctgaagctgacttgctctagggtgcttcatcaccacttccatcttgcatcaccttataactgttctgtcttgttctctcccagcaatttattttaaaacaagggctagcttcaagcatgactgttaatggctcctctgtgacaaaacacaagttggaccaaggagaaagccctttggagaaactggaccctagttcagtttagatctcaaatataggctgaaatctcttaccaaagtgcgttccagataaaaatgagacttagaagacagactggtctaatatgctcactggtcatcacattcagcttattcttacgtgccagtgaggccctaagggtctcagtgcatagcatacctgccactctggatgttttcctgggcttcatatctgtatggcaaggagggagctgtccttcagcagacaaagtcaagcagctttaagtacaaggcagcttgaaacctctctgatgaaagtgaaaaatgtgggtagcttatactttcaaactaatgccagtgactagagagaggtttcattcatgatgtgtatttccaatttggtcttcaattcaagagatgcttcataaaacacttatagccttaaaccattcaagggctaattaaaaaaatagttatgaaatcttagccacaaaaaataaatcaggtaaacattttaacctgtcgttaagtgttgtaacttcaaaaaaccaaaatgcttattttaatgtgatttttctaaaactattgaaaaattaatatttctataatctattaaaaaaaatggagaatgttttctctcaaatttcctctgacccatgggaatgaaaatacttaaatactgtaaagcatatctattaataattcccccaattttttaaactaacaaaatggaatgttaactgaatggaattaaacatagcaattgtcaagccatcaaaattatatatcgaaccacttaggcatgttacggggtaaagtcctcacccctgcatttgagaaatattttattatttttattttaaggcaaaacagtgtttactgtgatgggcagaacagccttttgtatctaggagtccatttgagttctttccaatatttccatatcgttcataaatgtgtctgggggcttccttgtttggaaaatatggatatcgctttgttttcctttgaaagtaattatatcttaagaacatagtatcatgaatggagtagacagggaggctgcagaagccatttctctttgtagataaaaagcattatctatgattgttgtataataaattgatttttacattaaa

SEQ ID NO: 612 - DNA, 1312 bp, Homo sapiens
atctttctaaatcattttctgaagctgacttgctctagggtgcttcatcaccacttccatcttgcatcaccttataactgttctgtcttgttctctcccagcaatttattttaaaacaagggctagcttcaagcatgactgttaatggctcctctgtgacaaaacacaagttggaccaaggagaaagccctttggagaaactggaccctagttcagtttagatctcaaatataggctgaaatctcttaccaaagtgcgttccagataaaaatgagacttagaagacagactggtctaatatgctcactggtcatcacattcagcttattcttacgtgccagtgaggccctaaggtctcagtgcatagcatacctgccactctggatgttttcctgggcttcatatctgtatggcaaggagggagctgtccttcagcagacaaagtcaagcagctttaagtacaaggcagcttgaaacctctctgatgaaagtgaaaaatgtgggtagcttatactttcaaactaatgccagtgactagagagaggtttcattcatgatgtgtatttccaatttggtcttcaattcaagagatgcttcataaaacacttatagccttaaaccattcaagggctaattaaaaaaatagttatgaaatcttagccacaaaaaataaatcaggtaaacattttaacctgtcgttaagtgttgtaacttcaaaaaaccaaaatgcttattttaatgtgatttttctaaaactattgaaaaattaatatttctataatctattaaaaaaaatggagaatgttttctctcaaatttcctctgacccatgggaatgaaaatacttaaatactgtaaagcatatctattaataattcccccaattttttaaactaacaaaatggaatgttaactgaatggaattaaacatagcaattgtcaagccatcaaaattatatatcgaaccacttaggcatgttacggggtaaagtcctcacccctgcatttgagaaatattttattatttttattttaaggcaaaacagtgtttactgtgatgggcagaacagccttttgtatctaggagtccatttgagttctttccaatatttccatatcgttcataaatgtgtctgggggcttccttgtttggaaaatatggatatcgctttgttttcctttgaaagtaattatatcttaagaacatagtatcatgaatggagtagacagggaggctgcagaagccatttctctttgtagataaaaagcattatctatgattgttgtataataaattgatttttacattaaa

SEQ ID NO: 613 - DNA, 24664 bp, Homo sapiens
ccttgtataatcttggaatcacacttctctccgcgtacatgctggcagaggtaagtgtttatgtagccaaagctgaagtccagtaactagcagtttttattaacagaaacaaccacatctagcctggcagaactatgcaaggttactttaagacctaaaaacttattccagcatttgatattattctttctgaaaatcctggaagtccttgtttataacttgaatctttctatcccaatttagacctatttctttttttttttgagatggagtctcgctctatcatccagcctggagggcaatggcacaatctcagctcactgcagcctccgcctcccaggttcaagcgattctcgtgcctcagcctcctgaatagctgggattacaggtactccccaccatgcccggctactttttgtaattttagtacagacagggtttcactgtgttgcccaggctggtcttgaactcctgatctcaggtgatcctcctgtcttggcctcccaaagtgctgggagtacaggtgtgagccactgcgcctggcctagacctatttctttagtctctagtctaattataatttagattcacaatgtagatcaaatgggcctttcaagatcatgttacaattttctccttttacagattaggatactgaggcttagaaaagtttcataatttgcctgagagtagacagtgattaaccgagtattttaaaaattaacttaaacatcatatgcagttagtttgactgaaatgccaatatatatattcccttaaagaatactctgtatgtctttggaacactgacgttttagctcagctctagtggccctttgttacatcctgtgctccaaattcctctgtgaagcaccaaaccaaggtcattttacaggagaaggaacaaggatgattgccccatctgtacaaccaaggttattttaatgtaaaggaaggggaaatctaaaagtgttaaataacttgctgtagaaaaaaaaaaaaaaagagggacaaagagaacaaaaacaaaaatttttagtgattttatagcttgtataaaatcattcatacaagctataagcggtggataatggcacaaatatagctgcctttctggtgatcttgagttctaaaagaaaacaaatccttgccttaaaatgaaagttctcttgagagtttattctatgcattattctaatatgtaccattcttaataactattaatattaccataaatgactggaatgaagctctcataatggaattttaggcatcagtcagtataggagatggaattttggggtcaaaaaagccatgctgacaacttttttttttttttgaggcagagtcttgctgtgtcacccaggctggagtgcaatggcgcaatctcagctcactgcaacctccacctcctgggttcaagcaattgtcttgcctcagcctcacgagtggctgggattacaggcacccaccaccaatcctggctaattttttttttttttagtagagatggggattcaccatgttggttaggctggtctcgaactcctgacctcaggtgatccacccgcctcggcctcccagagtgctgggattacaggcgtgagccgccacccccagctgacaactcttaaaattatatcacataggtgctcacgaatctacttgacactgaaaggaccatttttattttaggttctctactagctgaattttagctccctagatgagttagcaagatagtaatttatgggattcgtttctctatatagcagaaggcaagatactcttggattgttttccataagtgacagctgcacactatttacaatagcaaagacttggaaccaacccaaacgcccatcaatgatagactggataaagaaaatgtggcacatatacaccatggaatactatgcagccataaaaaagaatgagattcatgtcctttgcagggacatagatgaaactggaagccatcattctcagcaaactaacacaggaacagaaaaccaaacaccacatgttctcacttataagtgggagttgaacaatgagaacacatggacacagggaggggaacatcacacgcccgggcctgtcggggggtggggagcaagggtagggagagcactgggacaaatacctaatgcatgtggggcttaaaacctagatgaggggttgataggtgcagcaaaccaccatggcacttgtatacctatgtaacaaacctgcacattctgcacatgtatcccagaatttaaagtaaaataaaaaagaagtgacagcagcagcagaagggccagcctgcatgtccaaccacaccagcagttctagtacctgtttgggtggagctttggtgtaatggagtcagaagatacaagtttgttttagctctgtcactttctgtgtaattttacagcagtttaacttagactttccaaaccttaggcaacttatctataaggcagagatacaatatttctcctatataactcttgagtgacttgtaaggattgatgacttctgttcaatcagcatgtagtgagcttttcctaggcactgaataggaagccctgaaggtataagatggataagacacagcttctacacttgaagagcctatggactagtacagggtaggagttggtaaatgtgaaaatgctttgtgaattgtaaagtgctagttgaacagtagtcaccatcaacaggagcaagaacaaccgtttagttgttgaacaacgaggtaaatgtcttctttctaggaagaacgtatctgcactgagcccattgcctaccactgattttatctactgcttacccactctttctcttaaactttgtataggtgtaaaatcacttagttcagttcaaaatcactaccattgattgccacccagtctcctctctttgattgtgacctctttcagagcaggcaaaaggtcttctttgacactctgggggtatgtttaatagatactagtcaggtgacacactgatttaaccttgctaacttgttaggggtcagcagatgtttgcttaagccagaaaatcaccgcaataattattaacagtctttcaacaaatatgtattgagttcccacactgtcagattcgactgtagattctagaacacaacctttgccctgtaagaaagagtgagaggctggtgatggggcagcctctgaaaaggtgacattggagttgagactgaatgacacagtggacagaggatcagtggttcaagatgaggtggagagatggcagatgacattgggcccttggaaggaatttggcttgcactctaagtgtaatggaaagctattggaggattttaatgacgggagtgctattatctccctcttaaaatagatcactctagctcctacatagaaaatggaccatgagggtgagttggcaagaatgttagcaaaagtccagttaggagatcattgcagtactacaggcaacagatgttaacatcttggattaaggtggtgaagatgggaagaagctggtggattctaagtatattttgaagtgatttagtccacacctccttacacctaaccctatttgacagccttgcttccttttcttcaacacataggttggatgactcctacaccagtaaggggattaagaatggtccagggagagacagagcctctctagcttggctgcctattcataattgtcaggtagttctgcacagatgccacaggaatggggacagcccggataaatctaactaaagcaggaaacatggggaaacagaatatgccctgtcctctccacagtcaggagttactctataactgtattaattgcggagtagagattagagccccttactacagaactacaacctgaccatagaggtttttaattaatccttgtacacaaagttaaacagctttcttagtttgaaaaaatgcacgaacacaccaaaatttatatgtagtttaaggtctttctgggtcctctctagccagtcgctgattcccagttgagaactaagagcataaatcccctgggagatactgggaaatgacctgatttgtagtagatcccattcaggaaaacccaaggttttcttctttcactggacttatttatattgataatctttaattagcatgatgttaacagaaagggtttttgttagaaggaaagagaggtatatcaggacagtgaagaagtctcacaaaggttctaaaacattctaaatgttatttagtaatctctctctctctaacaattaattaacatccaaaccctctcagctgtgtatatgtattttaatggatattgtgtatgaattttatacatctctaaggcagcagaaaatattaaatcgtaggcctttcgcctgtaatacctgatccaaatcaatcccaaatgccttatattctagaattttaactttttacagggagaaaacttctttcatagcattttcaacaaagaataaaaaagctcattttctcatgaggtggaaagtacaccaaacaatgaattaggaagtctgaattctaatcatccttctaccactttctagtcatgtaatcttgagcaaatcatacactcatcaaatgtttactgaacacttaccatgtagcaggtactaggcaaggaactgtagatacaaagatgagcaaaaacagatgcataaattttttggagcttgttggtttttgagagtaatggggaagacagacattaatcaattaaccaccaaattgtttgattaccaagtagcataaatacagtgaagaaaatggtttaagaaccttactgaaccctgtttttaatatctgtaaaatggcaatatatgtatttttaaaaattattgagatgattaaatatatttaaaccaatacaaaatattaaacttttactgtagttttctcacagttgttttcaactaattctacattacacttgtagaaacatgactaggtaattccttacataaaattttgtgaatcaaatgatagttaaaatctgttattttggccaatgtagttagaggtaacatatgttaattaaggaaatagccattgatttcagttcaacagcaggaaataagtcccctgataataggtgtttgaggataggattgagacaaactcaaattctgggaaattcctactcaaaccttgaacagatgccagagacatgaatgggaaattcagtctgtatccaaattcttgtgctgatgtttgtttttctttctttcttggttctttggcagctcattctctccacttgggaaggaggctacaacttacagtgtcaagatcttaccagcgcaggggaagctgacatccgggtgagccactagaagcaaatcaaccaactataaccagttcccattgacaaggagaggaggttttctccttccagatagagggctgaggctagaattagataagaaaggggttcctgttctaatagaaatgcttggtaacaaagatgatttccaactatccctctatagaggaccaactgaataaaccacagcacatccacgtagcagatgcctctaccaagtggagtgaggaagagctctataccgctacagaattgtctctgggatatagttacatgaacaaaagcaacttgcagaccgtgtttataggatagcaccctttgtgcaataaatgatatgaatgtgtatgtgtatttgcttatatttttaaaaagaaacgagaggataaactaaaagctaataaaaagtgtttctgccgggcatggtggctcacgcctgtaatcccagcactttgggaggctgaggtgggtggatcacgaggtcaggagttcgagaccagcctggccaacatagtgaaaccccgtctctactaaaaatacaaaaattagccaggcatggtggtgggcacctgtagtcccagctactcaggagactgagccaggagaatcgcttgaacccgggaggcggaggttgtggtgagccgagattgtgtcactgcactccagcctgagcaacacagcaagactccatctaaaaaaaaaaaaaagcatttcctttgaggggagggaacagggcagaggggatacaggagaagccagaattctctgaatgtaccttgtgctatatttgattttggaaccactgagtgctttacataattataaaacaaaattaaatttaaaaagaaagcaaggcagccgccccctaaaagttggaaacaaacttaaataaatgaatatacctatatattaagttggtgacataatcacccaaggaactatttcaagtgactttaaaacagttttttgactgaacgcccctagtgagatatatcttaatagtattcagtaatttttttattgttaataacatcggtattgcttttttgacactgtgatagtacactatgggataaattaagtgtataataatgttaatatctgtaggcacttcgatttgaaacatggaaaaaaagagataccaataaaaaagttaaactaaaactcattaatgatagattcaaattggaaatatcagaattaactttatttgtttttaaaaattttaattttcagctctgtctacagaaaaggcctagtctatgacaacccagtacaacgagcagtgattacctagattgtgctctctaaatagaattttctccagaaaagattaggtttcttagataatgggcctcttcctggtttggggcaggaaatgtttataagatgaacccaggatatctatgagaaagcgaagcagctatccaggactacaaggatcatcacaaaaagaggatttgcctggaagggaccccactgcctaaaaatggagcaggttgaacatcaaaaagaatactgactggaattaactgaaacattaaatatgtaaaaaactgtgagtttaaaatgatactgattgtaaaagctcttattgttaccttttgaaggttgttagagcaccaattcattttaggaaaaaaaaattagagggaaagaattaaacatttatcttgcctttcatatgtgaatttccaaatcgatgaaaagggaaagttcttctctagagaaaagaaaaatgcttaggtaacaattagaaaaatcaccattttgcaactcctagtgaaataatggatcgtattagtttgttttgcattgctataaaggaatacctgaggctgggtaatttatagagtttcattttggctcatggtactgcaggctgtacagaaagcatggtgctggtatctacttctgatgaggccctcaagaagcctataatcatggtggaaggtgaagggggagcaggcatgtcacatggcaagagagggagcaaggcacaaggaggtcccagactctttcaaacaattagatcttacagtaactcaccacaggaggggcaccaagccattcatgagggatctgccaccgtgacccaaacaaacacctcccaccaaggccccacctccgacattggggatgacatttcaacatgagatttggaggggacaaacatctaaactatatcatggatctgacagcaatcacctgtggatggtaaaactattcggtgaaaattgaatagaaacttcataatgacgactcaatacctgaactcactgttcagtttgagtatcagtggaacagccggaaattacgtacctcctgatgtgaggcagtaggaagtagacagaaccctctgaagtattcgtaccaaaaacattacacctgagtctaatcaagcctgtaaatctaattgccagtaacaaaacgcatgtgtagagaaacaaatgatactacgaaacaatcatacaaacctataatattagaaattcttcataaaggatctagtttttctaagaaataaaagacatgaaagaatgggaggagcaaagagaactgttattggttagaagagacttaaaaaccatttcaaaccaatggaagatggaccttctttggatcgtgatttaaactaattataaaaagacattctggaggctaggaaaacaacgacatttttgagaccgagaaatttgaacatggattgggccattagaagatactaaagaattgttaatgttgatagacaacagaatgacttcatggttatgttaaaaagtctccctatcagaaggatttataaataaagtgatacctgagatttgcttataatattctatacttcccactcccctgccccccaaaatggtgggaagtggaattgataaatactagattggaatcatattgaaaattctgaatttcggcattggatgctgagtgttcatttgacttattctccttgcattagtgaatgtttgaaattttctataactaaacatgacatattattaagacagatggtaaaaaccatttaactaaaatcttttaatatcaagatggaccttttttttgagacagagtttcactcttgttgcccaggctggagtgcagtggtgccatctcggctcagtgcaacctctgcctcctgggttcaagcgattcttctgcctcagcctcccgattagctaggattacaggcacccgccaccacacctggctaatttttgtatttttaatagagacggggtttcaccatgttaaccaggctggtcttgaactcctgacctcaggtgatccacctgcctcggcctccctacctcaggtgatgcacctgcctcagcctcccaaagtgctgggattacaggcgtgagcctccacgcccagtcaagatggatttttttttttttcttttttgaggcagagtctcactctcccccaggccggagtgcagtggcgtgatctcggttcactgcaagctccgcctcctgggttcacaccattctcctgcctcagcctcctgagtagctgggactacaggtgcccaccaccacacccaactaatttttttgtatttttagtggagatgaggtttcaccttgttagccaggatggtctttaactcctgacctcgtgatccacccacctcggcctcccaaagtgggacattttaaaaacgtcttcaaaactgcaatacaaataaagtaagatatagtgatttctctgcacccattttatttctaatgcattaccacaaaccagtgcataccatacagttctctaaaggttgttttatatttatttgtagtttaatatttctaaaggttaattatctcatcagacattaagacggttgcggccgtaccttatgatggtcttcttgggaagtagacagtagagcatgatattttaatttcaagattcctattatgcaatgtctttaaaaatatcttatgtttaatgttagtggtaaaaacacagtgcctttaactaaagaaatgtctccctatagatgagactgacttgagggccttaggagggaaaggatgtgttatcatgacctcccaccattagcaaggatgaataacatcttgatttttaatctagtcatctgaggaaaagacacaaaagatgtagccatagactgcccttggacagtctaagagacaaaaaacatatatactttagaagagcagaggaaagttataatttaatgtaacaaataataatgacctcctgttgagttctaggccctgagcaaatgtgagtgacagtttctgcctttgagtgatttgcaatctattgatagattcgtaacactagctacaccctattatgtctattgattatggagccacagttaaagtaatttgaatacaaatgaagcagcagttcagcctgaaaaaggaaagggctgggtgaagttccagagaaaaggtggcatttaagaggaatattaaagaatatgccagacctgaagtaggaaaggagtgctgggagcagagagaagagttttcatggctggaggaggagtaagcaggccactgttccagcacacaggacaccgtggtggggagcttgcaggaggctggtggaaacagcagccacccaagcccatgggagatcctgggttcaagccaggagtcatgaacttgggttctgcggatgcagaggaggaacgtgatcacacatgtgttctggaaaaataactcatctctcactagaggtgggtggattgcttgaaataaggagaaactggagacaaggacaccaggtgagctgccttttcagcagtgagaaagaaacagcaggaaaccacaggcagcaggcagaaggccgagcagtggggcagcaccaggaacactgccatttctcacccttttctcccctttacaaatttctataggtagccaaggtgctttggtggtactatttctccaaatcagtagagttcctggacacaattttcttcgttttgcggaaaaaaacgagtcagattacttttcttcatgtatatcatcatgcttctatgtttaacatctggtggtgtgtcttgaactggataccttgtggacaaagtaagttattttgttaatttttccgttttgaggaatggctcttagagaccactggtgctgtcttgtattaagcatcgcatgcagatcaggagagcatgaagggaggcctagagcgccggccttgccgcagcaggatgcccgtgtctgccaggggtcatgtattctagtgtctggtctttgatacaggcaaaatctgggccgaaccttaaatttaaaactgttttcttttccacacatcatatgtcccatggtcagaggcacataccccagcgggagctgcttcactccaatcccgggcgctgttttgactcctgtggaaatacatcaccttccacagtcaccacttccccgtgaaacagatcgaggcgaggcatttcagcttttagggtttcttgttttcacattctgaaaaattaaggttacatctctgaaggacctaccagattttccattttttaaaaacagaattacaataagaaatacattttatatcacaacccagtgcactcattcatatttgttctttttttttttttttgagatggaatttcactcttgttgcccaggctggagtgcagtggcgcgatctcagctcactgcaacctccacctcctgggttcaagcaattttcctgcctcaacctcctgagtagctgggattacaggcgcccaccaccacgcccagctaattttttgtatttttagtagagacagggtttcactatgttggccaggctggtcttgaacttctgatctcaggcaatccacccgcctcagcctcctaaagtggtgggattacaggcgtgggccaccgcacccggcccttcttctttttttatttttttaagacagggtctcattcttctgcccaggctggaatgcagtggtgtagtcatagctcaccgcagccttaacctcctgggctcaagccatcttcctagttaactgactacccgcatataccaccatgcccagctatttttttttttttttttggtagggctgggcatagtggctcatgcctgtaatcctagcactttaggaggccaaggcaggcgaaatcgcttgagctcaggagttaaagaccagcctgggcaacatggcaaaatcccatctctaccaaaaaaaaaaaaaaaaaaaaaaaaaaaaattagctgggcgtggtgacgtgcacttgtaataccaccagctcctcgggaggctgaggtgggaggatggcttgagcccgggaggcagaggttgcagtgagctgagatcacgccactgcactccagcctgggagacacagccagattctgtctcaaaaaacaaaacaaaacaaaaaagtgtagacatgagattaattatattcaaccaaagcaatatactcttacatgatttctaggccccatgacccatgtctagagacattaattccaaccagttgtttgcttttaaatgagtgatttcattttgggaaacaggtttcaaatgaaaatatatacatgggtaaaattactctgtgctagtgttgtagtgttgtcttattaatgtttatggtcccacttgtatatgaaaatgtggttatgttaattggataatgtatatataagaagttaaagtatgtaaagcataacttcagccacattttagaacactgtttaacatttttgcaaaacctccttgtaggaaaagagagctctctacatgaagatgacttgctttatatttcagattttattttaaaagccgtgtctgttaagaaaaaacacaaaagaacccaattcctggttcataattctgtattcttactcactttttcaagttacctattttgttgcataaactaattgttaactattcatggaacagcaaacaaatgcctgtttaataaagaattttgaccaaggctataaatgccatttacattattttcagtattgttggttatatttaaattttcttcataataaagcacacttttattttttaaaaaagtgtagacacaaggtctctctgtgttgcccagactggtcttgaactcgtgggctcaagcaatcctcccccctcagcttcctaaagtgctaggattagaggtgtgagctactatgcctggccctcattcatatttctctgttttgtatgatattttatgaaacagtatttaccctggctctatatgatgtactgtatatattttttaatcctgtttttttttggttttttttgttttgttttttttgagatggagtcccgccctgtcgccaggctggagtgcagtggcacaatcccggctcactgcaacctctgcctcccgggttcaagtgattctcctgcctcagcctcccgagtagctgggattacaggcgtgcgccactacgcccagctaatttttgtacttttaatagagacggggtttcatcatgttggccaggatggtcttgatctcttgaccttgtgatccgcccgcctcggcctcccaaagtgctgggattacaggcgtgagccaccacgcccggcctaatcctgttttacaaagagttgatgacaattctcactgcattgacttcaccattcactaatgggtcagttatgacctacagtttgagatgcactgagctatagggaacagtactctctatttgatactgtcttgttctcaagaatttagaaatacaatatgaaaaatcagaacatgtaaaacttcagtcaaaatgactttgttccaggatttaggatcttgtagagatgatattagggaaaaaagtgcccagagatatttggagtatcagtgactgtgaaggtacaaatgaacactagagtgagggaggaaattgctgtgagtgcagggggaagaaagaaagaattgatctctgtccttctagacgggtagacatccatttcttgagtttagttattaaggaaggacaactataatcaatattagaggagaattaccaaggttaagtatttttatgattgtcaagtttcattacaaatcactaagcatctaaaacccaaatcatcactgtgtacagacatagtcctgtaaatactgtgacaatttctgcttaagaatattagaaaaatgatactttgacctaccagagcagactttcaattttttgaaatgccttaatctgtatcacagtgaaatggtgactgtggaaggtgctgtatttccacaggagtcaaacataagcaacaactactcatggttcattaattgatggaaatgaaaagtcatgtaggtaaagaaataccactaatactatgctgcttggtagtctgaaactctgtttgtgttttcatataaattcaagcgccgtaacagtttatttcagccagtattggttgagaatttactctatgcatgctattgtaccttttgtttcttatttattaatttgcatttagctatccagatcactaatctaggattaaagaaccaggctagggaatttaaattgatttattagccagcatatgtgcggtgcttttaaattcatatattatctcagttaatttcatcccaaacttaagagctagttattattattatacctattttccaggtaagaaaataaaaatttacgtcaaatcaatgtctccaaggggacatagccaataaatggccctctaatgccacaatccctcccaccacaggatagctcgcagaacagccatctggatcccaggctgacagctgaagagcattcactttgtgccaagcattgttctaagcactttcatgtactgatgaaatcctcacaacactgagtttccttatttccaacaagtgatgcatctgtggcatctcacctcttgcagctaaatcctttcaatgcttagctgacccagcatggtacatgaccctttctccatggtttcctgaagccttattcacctatggtggaggcagttacagagacgtttcatgaggttgatggcaggggcctggattttagacatccctcatcctaaaagtctctgcaatggccaatcactgggaaggtctcgctggccagtttctccgccactccagccttctctgtctcctttattctttctccagcacctcccggtccctaagtgtctttcaggcagaatttatttacttaattatgaaagcaatatattttgtctctctagcaccctgttcagccatgtacaaaaggctctttgtcaatatgtcttatcaaaggtttagctaaaaagcaaagacaattctatttcagaggaattctgccaacagctttaagctagtatttcttttcctccctcagtagctgatagtagtgacggttaaagagacagtaaaacctcgtagataaggtgttcccctgtgtggcggggggggggcattctgaaaaaccatcccaggctactccttctatcatggagtttttggtgaatcctagaactggcacagtaattggggaatttattagtgtggattttgttatatgatcatgtcatatgtgctactcattttcaattaccatgcagagagagaatctcacttgacaaagaagaatgaacagtccttcctggaagaatagtgatttttatactgtacttttataggtttctttggaccaacactgaacagttttatccacattcttatgtactcctactatggactttctgtgtttccatctatgcacaagtatctttggtggaagaaatatctcacacaggctcagctggtatgttgtcccttcttttagcttttctccatgtggcttatggatggggaaaggaaatagaaatcttagaagtcagagggctttttatgtgtgatgaggctgcccattttttttccaaaattggccttttaagaattaaactttttgtgttgaaatgccctttgtgcatgctattagcttataatggaaagttccttgctttgaaatgtagatgattacttttcaaattaatgtgtaagttaaatcctttttgtctaaataattttaactgcgacttttccatgaggaaatcatgggcaatttcacatactaatttcaaataagatttctggatgagggggctgcttcagcagctttgttttgttcctacataattccaagagtcctaggagttgatttctgaattgatcaagcttggccgcagtgtctgtgtggcacagcctggctcgctcacagagatgccctctctgccgtccccaggtgcagttcgtgctcaccatcacgcacaccatgagcgccgtcgtgaaaccgtgtggcttccccttcggttgtctcatcttccagtcatcttatatgctaacgttagtcatcctcttcttaaatttttacgttcaggtacgtggaatgtaaatattcagcagtaaaatgtaatcgattggcactatttttttttttttggagacagagtttcgctcttattgcccaggctggagtgcagtggcatgatctcagctcactgcaacctccgccttctgggttcaagtgattctcctgcctcagcctctcaagtagttgggattagaggcccggctaattgttgtatttttagtacagatggggtttcgccatgttggccaggctggtcttgaactcctgacctcaggtgatctgcctgccttggcttcccaaagtgctgggattataggcgtgagccactatgcccagcctagatcatgcacttttacattacatatttgtttaattttactgattaaatattatagtagcacatgcttgttgataaattcaggtagcagatacacaaagtgaaatttgcactcctaactcctctctccacaccctcctcctcaaagggtaaccacagttaataatctagtgggcatttttaaaaacatttttcaatgcatacacataaggttttatcaaaaatatcattggattatatatacagttctcaatttgcagtatgtatttgtaccatgctaccaaagtctgacatctgaaagttaaaaacgtgtatagtaagacagatccaggaaatgtgaatggagcaaagcaagggcttcttcaatgtttttaatttattgaatttcatgtttaaaaattggttccttatcagctaccctgatgttgcagcctcactgtttgtttgggaaccaggatggaaaggccgcaccgacgtctttatccagtgtcattttctttttagttaacaacttaaatggaagacagcttcaaaatgcagtttcaaagccactctgttgtacaagaacggatgaaagctataacagagaagaggcctcaggtggatgtagattttaaattgctctcttttgtaggctggggaaatggaaagcttagtttaaaaaacaaagtacatttatattcaaaactatacttttgaaattgtattcaactgtatttttttcagactaataagaagtgctttactttttagtttgcacttgctgaaagttaacccatagtggtttttatttttatttatttttttgaaacagagttttgctcttattgcccaggctggagtgcaatggcgcagtctcggctcaacacaacctctgcttcctgggttcaagtgattctcctgcctcagcctcccaagtagctgggattacaggcgtgtgccaccacgcctggctaatcttgtatttttagtagagatggggtttctccatgttgttcaggctggtcttgaactcctgacctcaggtgatccgcccaccttggcctcccagagtgctgggattacaggtgtgaaccaccacacacatccccatagtggttttatacagtgtggaacagtggaaactgaattttgacagcttttcaggtcttgtatttctgaaattggactaggctgttttaagagataaaggtttcctttgaagatttccaaagaaataatcaatgatgagaccaaacaaagctatgtgtgggtgtgcaaacccctgcccccaacttcccaataaacgctaagtgttaaagggaagctaagggagtgattttggtacctcgtgttgaagagaagcgtatagcccagcaagagtaggtaatggcattcaaagccttagccctacatgctggttcaaactgcatcttagttctgaagtcaagcatataatttaagtttggatccttgttaatactattgctttaaaaaaaaaaaaagtgaaaatgagatgcgagatcaggtattttgtcagaataggaaggatatgccaaaaactagatcaagccagaatcccaggtattggtattttaaaataacagcactttttccacttgaattatttttaaaagttttatctttccaagtgagcaactaatgcagaatactttgccagccccacaatatacaaatcgtgacctctaatagtcattgaaatacatgcatttgttttggtctttatttttaatctttaaccagaagtttaaaaatgatactataaacatgaaatctaggcagaaataaagaaagatgttctttgaaaccaataagaacaaagatacaacataccagaatctttgggacacattcaaagcagtgtgtagagggaaatttatagtactaaatgcccacaagagaaagcaggaaagatccaaaattgacaccctaacatcacaatgaaaagaactagaagagcaagagcaaacacattcaaaagctagcagaaggcaagaaataactaaaatcagagcagaactgaaggaaatagagacacaaaaaacccttcaaaaaatcaatgaatccaggagctggttttttgaaaggatcaacaaaattgatagactgctagcaagactaataaagaagaaaagagagaagaatcaaatagatgcaataaaaaatgataaagggatatcaccaccgatcccacagaaatacaaactaccatcagagaatactacaaacacctctatgcaaataaactggaaaatctagaagaaatggatgaattcctcgacacatacaccctcccaagactaaaccaggaagaagctgaatctctgaatagaccagtaacaggctctgaaattgtggaaataatcaatagcttaccaaccaaaaagagtccaggaccagatggattcacagccgaattctaccagaggtacaaggaggaactggtaccattccttctgaaaccattccaatcaacagaaaaagagggaatcctccctaactcattttatgaggccagcatcatcatgataccaaagccaggcagagacacaaccaaaaaagagaattttagaccaatatccttgatgaacattgatgcaaaaatcctcaataaaatactggcaaaccgaatccagcagcacatcaaaaagcttatccaccatgaccaagtgggcttcatccctgggatgcaaggctggttcaatatatgcaaatcaataaatgtaatccagcatataaacagaaccaaagacaaaaaccacatgattatctcaatagatgcagaaaaggcctttgacaaaattcaacaacccttcatgctaaaaactctcagtaaattaggtattgatgggacgtatctcaaaataataagagctgtctatgacaaacccacagccaatatcatactgaatgggcaaaaactggaagcattccctttgaaaactggcacaagacagggatgccctctctcaccactcttattcaacacagtgttggaagttctggccagggcaattaggcaggagaaggaaataaagggtattcaattaggaaaagaggaagtcaaactgtccctgtttgcaggtgacatgattgtatatctagaaaaccccatgtctcagcccaaaatctccttaagctgataagcaacttcagcaaagtctcaggatacaaaatcaatgtacaaaaaatcacaagcattcttatacaccaataacagacaaacagagagccaaatcatgagtgaactcccattcacaattgcttcaaagagaataagatacctaggaatccaacttacaagggatgtgaaggacctcttcaaggagaactacaaaacactgctcaatgaaataaaaaaggatacaaacaaatggaagaacattccatgctcatgggtaggaagaatcaatatcgtgaaaatggccatactgcccaaggtaatttatagattcaatgccatccccatcaagctaccaatgactttcttcacagaattggaaaaaactactttaaagttcatatggcaccaaaaaagagcctgcatcgccaagtcaatcctaagccaaaagaacaaagttggaggcatcacgctacctgacttcaaactatactacaaggctacagtaaccaaaacagcatggtactgttaccaaaacagagatatagatcaatggaacagaacagagccctcagaaataatgctgcgtatctacaactatctgatctttgacaaacctgagaaaaacaagcaatggggaaaggattccctatttaataaatggtgctgggaaaactggctagccatatgtagaaagctgaaactggatccttccttacaccttatacaaaaattacttcaagatggattaaagacttaaacgttagacctaaaaccataaaaacctaggcattaccattcaggacataggcatgggcaaggacttcatgtccaaaacaccaaaagcaatggcaacaaaagccaaaattgacaaatgggatctaattaaactaaagaacttctgcacagcaaaagaaacgaccatcagagtgaacaggcaacctacagaatgggagaaaattttcacaacctactcatctgacaaagggctaatatccagaatctacaatgaactcaaacaaatttacaagaaaaaaacaaccccatcaaaaagtgggcgaaagacatgaacagacacttctcaaaagaagacatttatgcagccaaaaaaacacatgaaaaaatgctcaccatcactggccatcagagaaatacaaatccaaaccacaatgagataacatctcacaccagttagaatggcagtcattaaaaagtcaggaaacaacaggtgctggagaggatgtggagaaataggaacacttttacactgttggtgtttacactgtaaactagttcaacccttgtggaagtcagtgtggcgattcctcagggatctagaactagaaataccatttgacccagccatcccatcactgggtatatacccaaaggactataaatcatgctgctataaagacacatgcacacgtatgtttactgcagcactattcacaatagcaaagacttggaaccaacccaaatgtccaacaatgatagactggattaagaaaatatggcacatatacaccatggaatactatgcagccataaaaaatgatgagttcatgtcctttgtagggacatggatgaaattggaaatcatcattctcagtaaactatcgcaagaacaaaaaaccaaacaccgcatgttctcactcataggtgggaattgaacaatgagaacacatggacacaggaaggggaacatcacattctggggactgttgtggggtggggggaggggggagggatagctttaggagatatacctaatgctaaatgacgagttaatgggtgcagcacaccagcatggcacatgtatacatatgtaactaacctgcacattgtgcacatgttccctaaaacttaaagtataataataataaaaaatataatatataaacatgaaatcttattagaaaatccagtgcccaactgggcacagtggctcacgcctgtaatcttagtactttgggaggccgaggcgggtggatcatctgaggtcaggagttcaagacaagcctgggcaacatggtgaaaccccatctctactaaaaatacataaattagccgggcatggtggtgtgcacctgtagtcccagctacttgggaggctgaggcaggagaatcacttgaacccgggaggcggaggtcgcagtgaacggggatcgtgccattgcactccagcctgggtgacagattgaaactctgcctcaaaaagacaaaaacagaaaatcctgcgcccaacaaaatcacatactgttttaactatatgcactgttaaagacaaggtcttattaaataacctttttatttttctcttcaaaatatacacatccaacagacataccgaaaaaagccaatgaagaaagatatgcaagagccacctgcagggaaagaagtgaagaatggtttttccaaagcctacttcactgcagcaaatggagtgatgaacaagaaagcacaataaaaatgagtaacagaaaaagcacatatactagcctaacagattggcttgttttaaagcaaagactgaattgaaggttacatgttttaggataaactaatttcttttgagttcataaatcatttgtacccagaatgtattaatatattgctattaggttaatctgttaactgaatgctttgatcagcattgaggtgatgctcacctccgaggacctcagaactggtgcagcttctctctccctccctcccacagactgaacctttcgccagaagctgtccttataacgccttatacgcatacacagccaggaaacgtggagcattgtttctcacagagagtctccaaataaaaagggttttgttcagattaaaatgtttacaacaaaatgttaattatattctaaatacagggtatgttctaatctatattaagcaataatgccagtgcataatcattccatttgttcctttagcaatcaaccccagaaaatattaaaatgggatcatacacagaagatagaaaaatctagcaaaacttctctttctgtaagccagagtcttgtctatcagattcccacaaccactcctgattctaaatttagtgatatggtaatgaaattggtatttattttaaatattagttattctaaggagaaaaaaatgcttctgcaagattttcataattcaggggctgtggataggattgttcctctgtttccctaatcattcatctgttcatgtctccctcttgtgccagtcagcctaggttatacagatgccatgctccacaccacgagcagtgtacaaatctggctgcccgtttactttctgagcaagcactggagtccactccgacctttttctttgaacatgcatgctgctggaatatgtataaatcagaactagcagaagtagcagagtgatgggagcaaaataggcactgaattcgtcaactcttttttgtgagcctacttgtgaatattacctcagatacctgttgtcactcttcacaggttatttaagtttttgaagctgggaggaaaaagatggagtagcttggaaagattccagcactgagccgtgggccggtcatgagccacgataaaaaatgccagtttggcaaactcagcactcctgttccctgctcaggtatatgcgatctctaccgagaagcaagcacaaaagtagacaaaagtattaatgagtatttcctttctccataagtgcaggactgttactcactactaaactctaccaagaatggaaacaaagaatattttctgaagatttttttgaagattaatttataccctataaaataaaacttgttagcttcgatgaagtcacttcatcttctctcctgccttatttttttaaataagtttttaggtcctgacactgacatcaaatacatgcacaccagaaaggcatttccaccaccgtccccactcattagcgtccagagtgcctttctctctcggctttttttcccccctgagctctagttttaaactttctcctgttaaaaaaattgtacttttatttcatgtaaactgcccctctgaggatttgggcatattttttggaaggtgcctaatgcttaggatagtctctagggtgatgcactgcacctgcttccttcccttcagtgcggccgacccatttctgttgaacagatgtctcctgtgtgatgcccctgactcttacatttatctttctaaatcattttctgaagctgacttgctctagggtgcttcatcaccacttccatcttgcatcaccttataactgttctgtcttgttctctcccagcaatttattttaaaacaagggctagcttcaagcatgactgttaatggctcctctgtgacaaaacacaagttggaccaaggagaaagccctttggagaaactggaccctagttcagtttagatctcaaatataggctgaaatctcttaccaaagtgcgttccagataaaaatgagacttagaagacagactggtctaatatgctcactggtcatcacattcagcttattcttacgtgccagtgaggccctaaggtctcagtgcatagcatacctgccactctggatgttttcctgggcttcatatctgtatggcaaggagggagctgtccttcagcagacaaagtcaagcagctttaagtacaaggcagcttgaaacctctctgatgaaagtgaaaaatgtgggtagcttatactttcaaactaatgccagtgactagagagaggtttcattcatgatgtgtatttccaatttggtcttcaattcaagagatgcttcataaaacacttatagccttaaaccattcaagggctaattaaaaaaatagttatgaaatcttagccacaaaaaataaatcaggtaaacattttaacctgtcgttaagtgttgtaacttcaaaaaaccaaaatgcttattttaatgtgatttttctaaaactattgaaaaattaatatttctataatctattaaaaaaaatggagaatgttttctctcaaatttcctctgacccatgggaatgaaaatacttaaatactgtaaagcatatctattaataattcccccaattttttaaactaacaaaatggaatgttaactgaatggaattaaacatagcaattgtcaagccatcaaaattatatatcgaaccacttaggcatgttacggggtaaagtcctcacccctgcatttgagaaatattttattatttttattttaaggcaaaacagtgtttactgtgatgggcagaacagccttttgtatctaggagtccatttgagttctttccaatatttccatatcgttcataaatgtgtctgggggcttccttgtttggaaaatatggatatcgctttgttttcctttgaaagtaattatatcttaagaacatagtatcatgaatggagtagacagggaggctgcagaagccatttctctttgtagataaaaagcattatctatgattgttgtataataaattgatttttacattaaa

SEQ ID NO: 614 - DNA, 830 bp, Homo sapiens
ttttttttgaacaggcatgctggtggaaaatgtttaaatcagaactacccagaagtacagaatgatgggagcaaaataagcactgaatttcgtcaactttttttttgtgagcctacttgtgaatattacctcagatacctgttgtcactcttcacaggtaatttagtttttgaagctggaggaaaaaagatggagtagcttggaaagattccagcactgagccgtgggccggtcatgagccacgataaaaaatgccagtttggcaaactcagcactcctgttccctgctcaggtatatgcgatctctaccgagaagcaagcacaaaagtagacaaaagtattaatgagtatttcctttctccataagtgcaggactgttactcactactaaactctaccaagaatggaaacaaagaatattttctgaagatttttttgaagattaatttataccctataaaataaaacttgttagcttcgatgaagtcacttcatcttctctcctgccttatttttttaaataagtttttaggtcctgacactgacatcaaatacatgcacaccagaaaggcatttccaccaccgtccccactcattagcgtccagagtgcctttctctctcggctttttttcccccctgagctctagttttaaactttctcctgttaaaaaaattgtacttttatttcatgtaaactgcccctctgaggatttgggcatattttttggaaggtgcctaatgcttaggatagtctctagggtgatgcactgcacctgcttccttcccttcagtgcggccgacccatttctgttgaacagatgtctcctgt

SEQ ID NO: 615 - DNA, 852 bp, Homo sapiens
agcactggagtccactccgacctttttctttgaacatgcatgctgctggaatatgtataaatcagaactagcagaagtagcagagtgatgggagcaaaataggcactgaattcgtcaactcttttttgtgagcctacttgtgaatattacctcagatacctgttgtcactcttcacaggttatttaagtttttgaagctgggaggaaaaagatggagtagcttggaaagattccagcactgagccgtgggccggtcatgagccacgataaaaaatgccagtttggcaaactcagcactcctgttccctgctcaggtatatgcgatctctactgagaagcaagcacaaaagtagacaaaagtattaatgagtatttcctttctccataagtgcaggactgttactcactactaaactctaccaagaatggaaacaaagaatattttctgaagatttttttgaagattaatttataccctataaaataaaacttgttagcttcgatgaagtcacttcatcttctctcctgccttatttttttaaataagtttttaggtcctgacactgacatcaaatacatgcacaccagaaaggcatttccaccaccgtccccactcattagcgtccagagtgcctttctctctcggctttttttcccccctgagctctagttttaaactttctcctgttaaaaaaattgtacttttatttcatgtaaactgcccctctgaggatttgggcatattttttggaaggtgcctaatgcttaggatagtctctagggtgatgcactgcacctgcttccttcccttcagtgcggccgacccatttctgttgaacagatgtctcctgt

SEQ ID NO: 616 - DNA, 5602 bp, Homo sapiens
attgagatcacatagccaactctgatgttacaacctcacctccttccctaccaggctgtgagcaaagtggccgccggggaacgggtggtccgaagaccttcatacctagacctgttccgcacaccacggctccgacacatctcactgtgctgcgtggtggtgtggtgaggaggctggcttgggtctggcatgggtgtggtgggagggaggagcaaactccaggctggtgctgagtgtgagaagggctctgagggacaagtagagtgtcactgtggagggcaggaggataaacctccatgggcgatctgcctggggaagtcagaaaatgaagcaggtagcagagacacatgggttcaagctcagactcccacttccttacttggaaagggacagatgacttagccactcagagccccagtgtcccttctgtaaaacggactgttgtcagttccatgtcagggttgctgtgaaaattagggtaaaggcgctttgactactggcgcatgctgcacagagggcattatggatgtcagggaaggtcctggcggggggaccgggggttgcagagacagaaggagattgcccttgtaaaatgccaagtcttcctgagaagagaggccaaagagggatgggaaggagggtccgccaagtggcactgagactcctttcaggttcggagtgaacttctcctattacggcctgagtctggatgtgtcggggctggggctgaacgtgtaccagacacagctgttgttcggggctgtggaactgccctccaagctgctggtctacttgtcggtgcgctacgcaggacgccgcctcacgcaagccgggacactgctgggcacggccctggcgttcggcactagactgctagtgtcctccggtgagcccagtcccataggttctgcccaccccagaagccgggccaggaaccctgcccactccccggagaccccacctcctggccaagaacccactcctcccccagatccctgctcttacccagtgagctcagactctccaccacttaagtttggcccactctggagactccgcgccctatccagaacacccctggctctcctccaaggccctctcactacctgaacccgcttccctccagatatgaagtcctggagcactgtcctggcagtgatggggaaagctttttctgaagctgccttcaccactgcctacctgttcacttcagagttgtaccctacggtgctcaggtgaggaagcctgcaactgatctgggggtatggggcttgttagtcacgtgtcttaaccaacacttctacatacacgcaccacaacctggtctctcactcattttttttttaattttaatttttggtagagacggggtcttgctatattacccagactggtctcaaactcctggtctcaagcgatcctcccgcctcagcctccaaaagtgctcgtattacaggcactattacaggcatgagccaccgcacccagcctctcactcgttctccacactacacccagaatacagagctaatcagggccctctgtgtttgccctagtcttggagaaggcagagcatcttatcttctgtactatgtgaccctgagccacgtcagacatcctctctgggcctccttaagaaaacaaccccaaggccgggcactgtggctcacgcctgtaatcccagcattttggaaggccaaggcgggcggatcactgaaggtcaggaattcgagaccagcctgaccaacatggtgaaaccctgtctctgctaaacatacaaaattagctgggtgtggtggcgaatgcctgtaatcctagctatttgggaggctgaggcaggagaatcgctcgaacctgggagatggaggttgcagtgagctgagatcatgccattgcactccagcctgggcgagaaactctgtctcaaataaatacataaataaaagaaaaaaattaaataataataataataagaagaagaaaacagccccaagaagccccatcctgcccacccccatcccattcacccctggaaggcagagatgcccttgaggactgtcccaagagcaaccccttgaaaggcccggggttgggggggtctttcagctagctactgagaggtgggaagaggaaaattctaggcatctggtcatgtttagaaagaggtttgcctcctcgaacaacatggcagggcctgtacaaactactgaccttcttccttccacatcaccctttccttatctcccagtctggtgacttgtcttctcttttagtgatacctaattggtactctgtcagaatgggggccctgtcctctggtgggtgctggcttgaggtctcctggcctgaaggtgggtgggaagaccaactgaaagaagtcctagttttcttagctatatggggagaagggagtatcagggcctgccagccctggagggaagccctgtggggcatgactccaggtaggtgtgaacaccatctgcctccctcatcctctttctctgaacagacagacagggatggggctgactgcactggtgggccggctggggggctctttggccccactggcggccttgctggatggagtgtggctgtcactgcccaagcttacttatggggggatcgccctgctggctgccggcaccgccctcctgctgccagagacgaggcaggcacagctgccagagaccatccaggacgtggagagaaagaggtgtgtgcacaggactgtgtctgtgtacgtgtgataacatgcatatggatgcaggtgctcagatacctgacaccttaggattcagacaggaaactatatctgcacatgtgtacttggtgcatgtatgtgtgcgtgcacaggtgagtgtttcagggtgcatgattgggggcatgtaaactgcaagcataaatgtgtacatgagtgtatgaacacaaatacataaggttgttcaggaagatgtgtatgtgtgcacactcaagtatgcctacacatcaggggtgtgtacaagcatgtgtgtgagtcacttgtacaggcgtttgtataccaggaactggggtgagccctgggacagccctgatggggcaggctggggtggtaggctcggggattaaaccccaccattgctcacaactccttcctccctagtgccccaaccagtcttcaggaggaagagatgcccatgaagcaggtccagaactaagtgggagtggaggcaggccctccacagaagctctgcagcaggggctgggagagcagaagggcaggccctgcaactcaggctgggagtatcgaaccctctgcctagggccggagttgctgccagtacccgctccctctgctcatccatccttgattatttggcttctaggaacagttgacttcccagaatgcagtgggctgctgggcacccctctcacggttggggaggattctgtaaataaaggtgccccttgggttggggcagtggtgacgagctgtgggaagagccctggataggaagccactgagtctgccctgggctctgataaaaccttcaccattaacttgctgtgtgaccttgggcatgtggctttccctctctgggcctcagtctgttcatctcccaaatggataatgaagcctcttgggaggccctaccataggatctgttgccatgctcaaatgagttactgaataaggtgcttctgcttcttctagagatggtgctaaagaaaggactagcatatgagacttctggtaccaatggggctggtgggcatgctgtccactgtgtggtgctaggactgccaatgccaggcccaagggacaaaaagaacagagctttttgttctcatggctggccctgctacctccgaggcaccctgcagggcaatgcatgtcatcccaacccccacactccccatcctccaacccactggtctcatgcccaaagaagagttgaaggcatgggagccaacattttattgaagaagccacagaggctgaaattcaataaacacaagttttatgagtaccttgaagctccagaatgtgctggggaaaggggttgtgatggccaggaggaggatacccttcaaaacgggctgttccctaaccagatagaaatgggaaagggaaaaaattggcagagaaagtctagactctctggcctaccatggagcctaggcccaggcccccaagatcccaccttccccaacccccatgggactggagatttttgtagcttccattggaccatgaggggcatgatgggaggcctgagttagggtgaccttttttgtgagcgtctcatttgaattttatcttcactgggtcatagatgtagcagcccacatcgccagtgttcacacctgagagagagagccctatcaccaaaggccctgggtctgtggtgcagggttcaggcctagagggaacttggtgggggggccagggtatgcttaaccacaggggaagttgtccacacatacccacagaccatgtacatgccatacttcaggcatgtacatgccatcccagtgtctgggatggggctgcccacctttggggccaaacaggtagccgtagcaggggacgtggcagtaggggactccatcatgctgagacacagagagaaagagagctgtctcagcctggttctcttcccatctccagcctcctcccaacataaccactcattcctgccctgctcacctcagcatgactcccagcagtcagggtcttgtggcaacgctggcacctcagacacggtcggtgccaatttctgcctaatgacatcaccttctcagctggtggtggaaagaagtggtaatgcttccattctaggggtagagtagggagacctacctgccttggatcacctccctcccccttgctgcccaccctgtatccccctccccaagttttccactgttacttaccaaaatagacgggctccccacagccagggcacagcgaggtctccccagtgaatgtcttcatatggggagggcctttaaaggggaagaggccctggctatgtctgaggtggagatgcccaccagcacctgcctgcatatggtgctgtcctctttcaaaagccatgctcattccagagtgccccacccaggcgcccaagagtctgccttctacaggcccagagctgagccccctctgactccacctcctgccccatccctatgtgtattagggactatctgcttccttctcctgcttccttttcatcctcccaggggctcacgtacccaccatcccaaccctgttagcaactcaatcctcaggaaacttgagctgatataggagctggccacagcacgggtgtcaggtgttggggagcacagtgtcattgcctacttcagggaatggagggaaagaacagggaccagaggagaaaagttgaagaatatgagaggctggccttatcccaatgactcctctcctttagatcattccttccatggccctggcctgggacagacctaagttcctggccagctttgcctctgactagctttgtggatggacagtcatttgccctgtctggatctcactttcctcacctgtaacacacgaggagaggggataatgccatctgcccaattaacc

SEQ ID NO: 617 - DNA, 376 bp, Homo sapiens
ggctatttcgctgttacttcaaagagcattaaagcctcggtcagacccacggggaggagagaggatcttgaagccgtggactccagactaggaaggcacatgtgtaacgaagacacctggacagggagctctactagtttctggagcggtaaggacaggaaaaatgtccacagtgcagacatcattaaaacactactctctccaaagcgagggagtaggcattctttgaaatgcaaaattccaccttggcagtatagcaagtggttgaaagcaacaaaatctggagcccgtctctggtaccctactctttgacttcaggcaaattactgaacctccctctctgcctccattttctcatctgtgcaatgagtatgat

SEQ ID NO: 618 - DNA, 864 bp, Homo sapiens; identical to SEQ ID NO: 377

SEQ ID NO: 619 - DNA, 32222 bp, Homo sapiens
aaaattctaaaaaatattttaatacttgaaaacttctaaaacaaaaggtaaggtaacatgttctttcaaaagtgaatttcacatgcaaaccattaattatatttattttactgtgagataaaagcaaaacataacattcggagaaagagaccagtaactgacctatttattttatattatattaatgtgaatcctcattagaaatgtgataacgttattgcacaaacaaaaccgtgggcagaaacatcccagcaatgcaggggcgcccataccgggttacaagggatgtccagcatgtgtttccctggaacactcagagtctgcacttttcctgcaaatgggaccatgtctgattatttattatgaaagaacactttaccgaccatttttttctcagttggtataatgtagaaataggcttttttacatccattaaatagtcttgaaaacatttttgcactaaatcaaacgagctgatatcagaaagcaattgccaccttccacctggagtaatgtgtgcatttttaatgctatgattatatgcttctttagggtgacacagtttctcttctggcttctataacacctgcattaatcttccttttttgctgttaaacaaaacttgctggcattatgcatcccatccactgggggtgggctgggaacaaacaggtttcgatggttcttcacaaggagacaaacaatctgaattatcttttacaaacagtgaaaatgacaagatgtttgtctctcagtatgcattttaaaacaacataaatagaatacacttcttttaacaaagcctggccttggtggctttctagcttgcagtctaagtaacgtttggtttgcagaagggattccctgggagacggctgtgtggggcaacctcacttactggttgtgtgttctccatgggaaaagcaccagatggggaagcccaggatcagatgtaagctgcaagcttctttctctcttcaaactgcttgtccactgccagagacagggcctggaggaacccctctatggtgacggtgggggcctagaaggtacacggtcattgctggaggggctcaactcacgtttggtggggccatctggcatccacagcccctgccgccacccacagtgcagatagcacagaagggggtggtagctgataaggtgagcagtgagtgcgcaccacacacgtccaggacgcacatcagccaagctctttacttcagaaaaggcgaacaaggtggctacgtgacccccgcccccgccatgtcctgaatgtcagaaacagctgcgggggtgggcaggggagcaccaaggcagccacccacacactgagaaggatgagaagctgtagggagcagaccctggagggcccaccctatgtcccaggcttataaccagagaattcccatggcccagtgcccagagctgtcacctcccctgcatcaaaaggctcccactcatgatccatggccactgtcacctctgtgctgagcactgtgtccagcacagaggctgctactgatcagacagagcctgagtcacttctgatttgaaaggaaacattccaagatgggggttttctcttctcagatgtaagtgtatctgctctgccagacactgagtccttaccccaaccggctgctggggacagtgcaggggaggggtgagtgccccaggccgaagcatctgcaacaggcccagcacccagtgggtgaggctgtggatccaggtcactgttctatgtgagctgaacccagactgaaagagcacaaacctctggtgaggccagcgagggccctggccacgagctcagcacaccacagaggcagacgtgcatgtgtgtgcatgcatgcgtgtgagcagaggcatgtggcacagccgcctcctcccaaaggactcaagacagcccctgtgtttcggtgccaaggtcagctcctcctccggccccaggaccctgtggtttagaaactgagataaaatgaggctgataccccagggctactaagcggaatctccggcgaggctgagacctgtggacagggcgggtgctggaggacagcagtggagactcacctggacatacagcgcatgagccagaaaggggagttttctcaggacccggccgctgaggccctcgctcttcctgtgtaaagaaaacccagttcagagacagcaatttatacaatcacacgtttcaggactaattttcctcattggccgaggcatccctgggaacacaagccgaggcgtcccaagcacaccctgggttcacagggcacttcctgcccctcactggtctcctgagccttgccctctgaatgtctctttgcccccggcctctcgtatggggccggtctctccccatcctcagctcctgctctgggaggcagtgtcctcgcggctctgaagcacacccaaggcacacctgtgtgctctgccccagggccagcatccttgtgctcagggaaggcatcacctgcccgggagcctctgccccagggccagcatccttgcgctcagggaatgcatcacctgcccgggagcctctgccccagggccagcatccttgcgctcagggaatgcatcacctgcctgggagcctctgccccagggccagcatccttgcgctcagggaaggcatcacctgcccgggagcctctgccccagggccagcatccttgcgctcagggaaggcatcacctgcctgggagcaccaggcgtaaggcacgatgcagcgggcacatggtcagtaggcacagagtccccaaataatgggtgggttcacatcttcaatttttgtagaagtctctgaactgttcttcgttcccatcttaactgatttaaatctcttcaacagataatccaaatccttaaaaaatactacattcttcatgttatcccttgtttaaagccttccacattcttgccaacttcaaaataaaattcaaactctggccagaaacccgaggctctgtccattccaccccccgcctctccggcacctccccagcctccacactgcaacccactagacggtcacctgaacacactgctccagcagccttcctgatttctctccagctggaaccaaattctatccttcaaggcaccgtttgattttcctaccttcccttccaccctccctggacccccaaagccatttcctttctgtggactctgcgaatccttgtaagtgtcgtcagccgtagggttgcaggcttccagtgtgagccagcgccctccctgagcaagggttacatctcctttggaaggaggtggctgtgctgcgtgtttctactcacatgcacacacacacacacacacacgtgtgtacatgcatgttcatacctatactgtgttgagagttcacacccagggccctccctggtctcctcaaaggaaacaatgactccctagttaatatcacaaatggattcttcttgattacaaaaatgaggtcaatttgcaccttgaaatgtcattcaaaagaaggctcaattttgacacgttgttttcaatgaagccaatcatctctagctctcggagggtcagcagctgctggcgagggtatatgatctgacactggggagacagaagtacaggcggttagctgagtccacagaggcctgagcgtaggcaccgtcagcaagagggacagcacctgcaggtcaaatgtcaaccacgccacgtctcacagaaatccagacggtgacgactcaagatgcacagctgcactagggaacaagctcgctctctcatgcctctcagcgtacacattctgctttttcaaacaaatacaaataacggaacatgcctcagaaaccagtagcaacatagcctcttctgtgtttcgagccaaaacttttcctccctgtgtgtcaggaagggaagggacctggaggcacccagtccagtctgttatgccaccttcggagacgtcaaaacccacagtgggcagagctgggacttagagccaggacttccactgacttccaaagcaggatcctagtttgtctgttttaaaggtgaggcttgtttggcagcatgacagtgtctgactgaccgaggagctgagcaccagaagttcccctcagagatcatttgtctggaagtcatgcttttccaagcagccttgccaacagtcaggtgcgcacactgacttactatgactgaattctaatacgaaccgttctgactcaggaacaaggagaaggaagaaaatagcattgtctgaacattttggaggtttgttgaggggtgtgagcaaaattaagacagtttgtgcttgtgctttgggggatattgagctttcgagaccagttcaatatccactgtgacatctgcatgtcttaatttcatataaactgcctaaaataagaaactacccctatcactgggcacggtggctcacgcctgtaacctcagcactttggaaggctgaggtgggcggatcacttgaggtcaggagtttgagaccagccaggccaacatgatgaaaccctttctctactgaaaatacaaaaattagccaggtgtggtggcatgcacctgtaatcccagctactcacgaagctgaggcacgagaatcgcttgaacccaggaggcggaggttgcagtgagctgcgatggcaccactgtactccagctctaggtaagagtgagactgtgtctcaaaataaacaaacaaacaaaaaactacccctgtcctacactgtcccagaaaaagtccatccctcttagctaacactttaaacagcccctggattcacagcacgagtgtacaagtgtataaacgtcacactgcgagggctggaacccacactgaaggtgcgtgaggacctccaacacacacgacttcctcgcaggatctgctatcacgtggggctccttggcagcaaaactgctgtagaatcagtcttcagatcactggcattctccaggcaaagctccacagagctccgtctcctttccccaacccccaagaaaaccatgcctggacagtgctgacccgggcaggcccagtgggtccatggctgagaccagttctcccgtccccaaccacagcagggtgtgccatccttgttaacacccctactctgtggtaccagcaggtggcaacaactgcattaaactcatcactgtttaaatccccattcactggtttgcttggttaccgcccaactaccctaaacaaaggcccctgcaggatgatttgtctgggacaggtctgttcccacaggggctagagcagcagaaacacaagcatggggcaggtccctgctagcctgactcacacacaccgcagcgtcactgcccatggcgacggcgttccagactcacgcacactcaccacacgcgtcactgtgcccatggcgacggccttactgactcacactcaccgcacatgtcattgtgcccgtggcgacggccctcctgactcacactcaccgcacgtcactgtgcccgtggcgacggccctcctgactcacacacgctccccgcacgcgtcgctctgcccgtggcgacggccttcctgactcacacacacaacccgcacgcgtcgctctgcccacggcaacagtgttcctgcctatcatcacaacaggcgactcaagaacgtgacgtcatgtggaccccgtgaccaaaaccaggcccatactacgcccgtgatgtttcctctttcaggtaaggatacaggcccccgagaggcagggcattggaaaagcccggggtaagctgagaactaaggtttgtgcagccagccaggtaaacacagccggtcactgacgtcccctacactgactggtacctcaaataatgaacaatgatgactgtattgtgccaaaagaacaaaaatattgagtcagtggccctagtttcaactatcagctcaacctgtcacatacaaaactagttttcaatttaagaagggagttaatgcatatgttgaaatcctccgtactggaacgagcttattttaagctatcttaattaattaagaacatataagaaatccatttgtatcaagaggaaaaaaaaaataaaggtaccttcatcagttcttccaaacaagagaggtagattttgaagatggctgctgcagagggtggcccaatgtactgcttgatgtcagccctgtccacgaaggccacgtcgatcttctcggtgatgttagaagtggtcagaatcacaacattggaatgcctgttgtggccgagaagcaagcaccacagtcatcacggctgtcggtgacccaattctatcctgccctatctggcaaggaggttggcaggacgatggccagcaggctgccaacaggaaggaaagtggccttgtgccaacacaggccacgcagaccccccagcctttgctctcgctgctccttggccttctgggaattctacagccccacttcgctcattccctcactgccttcaaccttggcaaggatctcactttcctttttttttttttttgagacagagtctcgctctttcgcccaggctggagtgcagtggtgctatctcggctcactgcaagctccgcctcgccggttcacaccattctcctgcctcagcctcccaagtagccgggactacaggcgcccgccaccgtgcccggctaattttttgtatttttagtggagacggggtttcaccgtgttagccaggatggtctcgatctcctgacctcgtgatccgcctgcctcggcctcccaaagtgctgggattacaggcgtaagccaccgcgcccggcctagcaaggatctcactttcgcatggcgttcctgattgtgccacctaccgtgggctctggtgcccaccaccacctgggcatggccactcatcatccctagacatactctagagctgggttacttcccatgttcatgatctgctctcccctctagcgtctaaactccatagagagagcccctgttgtctggtctgttgaccaatgtcccccaaggacccagcatgagccagcagagcgggcacaaggtgcccccagggagcatgctgcacaggcctggggggcgtggctgcacatgtggcagtgctaccactgctgcctggggaaggtcaacttcacctagaccctggccaagggagggcaggccctgtgcctgcgcgccggggtgagctaagcagaggcaggacagggagcctgtgggtccccggcagaggaacaaggcacagaggttgggtgagctcacagctgctcagtccagcaccaggagggtggggctgcaggaagggccagagggaggcctaggcctgcagatcacgacccaggggctgacaatccagagatgcgggagtggacaggactggtgggggacagaaagagtcctctagagaggggctggaaccagaagcacgagggaatgaaggcaagagaggcaagcgtgtctccttgtttcttcctgagccacacccccttgtgactgacagggagaagtcacggtggcctccatcctctggtttgagtggcaggtgcacagcgaggccatcagcgtcgtgtggaatcccaggaagttagggatttggggcccagtgagcagtgtgggagtgtgcctggcatcccgggcatctaagcctgatgtctggtcacaggtggatgtgcaggtctgggattccccccacagaaccctgagctatgctgaaggggcacacgccaggagagaaggccacagacaggctgtgtagacccctccctgcggagagacgccagcagcataaaccggggagacaggagaatggaggccggggagggaggcacaaagagattcagggaaggggccatcagggtgtcagcgctgtgcaaagttccagaaagagaaaagggaacactcatgtgaatgcggggctgctgggctgcggcgggggcaggagccagattgcagtagactgagagacaagccaggtggggaaggaagtggacaagaggagaaggaagccagaggcaggggaggcccccctccaggacctgcacacttgttggggacaagccccccaaaatctggccataaactggccccaaaactggccataacaaaatctctgcagcactgtgacatgttcatgatggccataacgcccacactagaaggttgtcggtttaccagaatgagggcaagggacacctggcccgcccagggtggaaaaccgcttaaaggcgttcttaagccacagacaatagcatgagcgatctgtgccttaaggacatgctcctgctgcagttaactagccccacctattcctttaattcggcctatcccttcgtttcccgtaagggatacttttagttaatttaatatctatagaaacaatgctaatgactggcttgctgttaataaatacgtgggtaaacctctgttcggggctctcagctctgaaggctgtgcgacccctacttcccacttcacacctctatatttgtgtgtgtgtgtgtctttaattcctctagcgccgctgggttagggtctccccgaccgagctggtcttggcacacattcctgcagctgaccccaaaacgagcgcttctcaggaagccagatacgctctctgtggtgagacagtggtgatggcctggacaaaacgttcctctgcacagttcagtctgctgtcaccccacactcaacaatccagcttctgagaatgccagggactccccaggcaccctgaggacagaaagaacatttcacagaaggaacctgagtcctggctgagcaccacacagggacaggcaggttctggctcgcccatcacttccttgggagttgggccagcagctgtcgctccttaagcttgataaacttgggctacaatgacaacaggccctggccctgtgaggctgggctgtggagacgtggaccatctgcacacgaagctgtctgtcctgggccagcagggcgagcaggggacagccattcacctacgagcagcactagttggtgctgacagtgggtgggataggagagaagtgggtgggataaggcctgaacgtagcagttcttcattttatgcttttctgtgctacgtaaaatgcttaccatgcctgagttttctttcacattttttttttctgagacggagtcttgctctgtcacccaggctggagtgcagtggcatgatctcggctcactgcaagttctgcctcccgggttcacaccattctcctgcctcagcctccagagtagctgggactacaggcgcccgccatcatgcccagctaattttttgtatttttagtagagacagggtttcaccgtgtcagccaggatggtctcaatctactgaccttgtgatccgcctgcctcggcctcccaaagtgctgggattacaggtgtgagccaccgcgcctggccttctattacatttttaacacactaaaaacaatttctttaaaaagcatttgtgatatgctgcttccaatgtggaaaaggagtcgatactcaatgccaaatgcactttccggtgaaagagctgggcactaagatctagggttgcacaagtatcacgcatttctttgggacaaacttctcatcacttctcagggaaaattgctgcatgtcctggttaccttttaatctgatcaatttgggtcaagacagcattgaccacgcggatggcatctgatggctcggtgcccgccctgcaggcatttcgggcggctgtgagactctccacctgttgggagggagcagtggggtcaaaaaggacagggcctggcacttcacaggcagctatggggatacgtcccgctgagcacgtgaaaaagatgaatgaatgggtgttcccgtgcctagcctgcggatgctgcggcaaggtggaaaggcgcacagtgcagggagggatagagggcagcccggctgtaggaggggaaagctaggagcatcaggagtaggctgtgtccccacaatggcaaaaggcgattctgtcatgaatttccttatctggaaatgcctacctcatcaatcagcacgaacaccagggcgtctttatcatcaatcaaatcctgaatcttctgaaacatcttggttaccagcttgccactctggaacccaaacacccttttagtgtcaacgtgcagggaccacactgccaggtgcacagggggaccctgatgtggcctgctgccccagttgtccccacaagcccactgtctcctgacggcccctcagaaagctccctaaatcagagaagctagggcagcatgggaggaggtcagcctaacactcttcccctctgctttgaatgccagggtgctgagacctgagaccacacctgacctgcccggggcggcacagtgagggtgacctgtacctctgctttacctgtgtgtcctctctgatgaggaaaagaggcagaccacagatgcaaacaggctgggatgcactcctcacaggctctcctgtgcccagcgtgcctggtcccacctcacctcaccagagggatgtgcggatgccaggtgacttgggcacagctcctcagaggtaagaatcacatgtgacatcaccttgtctgaccccctcaactcacagacagtgctagggcgcatgagcaccaaggacatgcatggcagggctgcagtcccctgagtgccagccctgcccttctgagagtccatcgattgtcctgtcccacccagtcacaggtctggggagaaccaagggagggtccccaagggccccagctccggaaccttctctgatcacagtcagccccaatcctcacacacccttcccacccagttctctcctgaagcttctggaggaggatttgcctaacatacaagacattttttcagctatacaatccagacaattagaattaatatttaatacttacttccgaaaaccacttagaaaagaggctgtggctgtttatttcaattaattggccatatcggtacctgagatagaaaaaaggagttgagagaattactaactggtcctgtggatcctcagcggcagccattcacgcgtcctgaatgcaacatctcaagtgcccagcatcgggggaattacaattactgacaaagaattgaggaatccagccctccgtgtactaaataattatgaaaaagtctaacaagattcaatcagtagttctagactgtatcaattgagttaaagagtaaaaactcccattttatatctatttacaaattatatttctatgtttaaaaatattagcagtactaacataagacagaaaacaaaacaaaatagaagcatcaagagcttttggcaggagctgagcattttcccctccttccacagaaccctaaacagcacagaccccagagcccaggaatgctcaggtggcccaaagttaaccttaacacacacagactgactggaacccagaaacactcctctatccattcagaagcccgcagacagatctgggcgtgcttagctgctgactaaatcaccagagaacaagactgaggccagagagaaactgacttccaggtcctcttttcagttgcttccatgtcaaaagtccacaaaagaaaaagaattacgttcaagaagcatcactggcattccacgtaaaaaagagagagaccgtttactgatactgtttattaaaacagtggagggatacagacaatctaacaaaatatagactgggttgaatattaaacaaaattaattataaaacattttgattctttgatagagtgaggaaaagtcttgctaggacttctttttgccatttctaagccataaaaccaatgcatatttccagatctttgtactggaaaaagctatattccttacaataacattttccttctcttgtgttgccctctctgcccctagagatcttttttggttactctttggaggcagggtctcactcccgtcacccaggctcaccacagcctggacctcctgggctaaggtgatcctcccacctcagcctcaaaagaagctgggaccacaggcatgtgctcccagctaattttttgtatttttttgtagagacagggtttctccatgttggccaggctggtctcaaactcctggtttcaaatgatccacctgcctcagcctcccaaagcgctgggattacaggcattgagccgccatgctggcatgcccctagagatcttgaaaacacacatgtatttcaatatgtcaaagcaaagggcaagttgctaaacataagctaaggggtcaaaataaagcaatttccctatgtaaaaacatttacaagacatttttgaagaacaaaaattatgtatacgaaattaaacctcacaggatttccgctagtcatactggagtaacaggaagcagatttaccatctaatcttaaatgagaaaacctcatttaaggcaaaatggatgaaatgacatctggtaaggttgctgtacacagggcagtgagggctgggactcctgagtcggaagaccagggaccctctctacaaatgctctaactttcttgccgggaggcatcttccaaccacaggcacgggagggagcccaagtggagcacagccactcgctgagtcgaggagacagagattggagttcagggagtctgaagtgactgaaggctgcagaacagaattccagaggggaaggaaatatgaagaaatacctcagaaggagtgcccaggatcctcatggcgcccccgatgtcctggatgaatactcaggtgtgtgtgagcaggggacattccctgcagctatgtaaagggcgcccgtggtctgtgagctgaagggctcctggacctcacacaggctgagaggagtgcatactccgaccgccagagtggagagtgcccacggatccttcagcacactcagtggagaccccagaggaccacaattgagtgttaagaccaaacctaaacccctcccagtcaaagcttaaaaaaaccaaacctcaaaggatcacaccaaatcacaagtaatggaaatgcctaacggaacaaaatctaacactcactaaaggaacacacaatccacacacttcagatcacaatgttcagcagctaatcaaacactacctaacatgctaacaaagcaaaaccatgtgacccctaaccagaagaaaaaccagtcaatagaaacacaatcagaaatgacaatcatgatggaattagcagacagaacattaaaacagctattatggggttgttcaagacgtgaacgagaacataatgaaaaaacagtataaaaagaatcaaatagaacagagcagaaaaatacactatcagacataacaacttcactgaatggaattaaaagcagattagacgatgtagaaaatcagtcaacttaaaatacggcaatagaaactttcgaataaaacatatttctaaagaactgaaaaaaaaaatgaaaaagcacaggagtggcctgtggaacaacatcaaacagtctaacatgaaagcagacagagtcccagataaaggggagggtcaaggaaattcagtgaggaaacaatgaccaggtattttccaaatgtgatgaaaaccataagccccaaacagacagaactcaagaggaaaagacaaatccgtaattagagacgaacactgcatccagcaaggggagaaagtatagtcttctgaagtgcaattcaccagcagagatcatgtgctggcaatcaagtaagtctcaaatcttaaaagactgaaatcataactcaaaactatgctgaatacagaggaatcaagtgacttacagtggagaggaatctattatttgcgtaaaatgatttagaaaaaaaaaaaaacaacctcccgttataaatcccattcccatggctctcctctcacagattaccgaaagttacctgcttgaaagtctaattgtcaatttctgggctaacgctttacacagggatgtttttccagtgccaggaggacctgtgacaaagatccaagcaaatatatttttaagtcagtgctacaacaaatttcttaaaacaacagtaacttccattatccataaaatataaggaatacagttaaaagctattaatgttattactacaatgaagtctgcttagaaacttaaatgctatgaaatattaccaatacacttacgtctccccctctttcttatttgtactcaacttcgtatttctggtctcagcctccatcgcctccccacccccagcactgctcccagcttctcggcctacagtctcacttagcgtcgggaatgaacattgcattttctagcctacatctttgctgacacctgtccttgtccccactcttcctttatgaaatccactcatcaaggcacctttcagagatcaaacacacctttcttgataaatggaggtggaggggtcatgtgttattcctgttgcccccagaaccaccctctttcctaagacaattctcagtgggctcataccccatactagaagaggcagaggccagcactcttcttgcacgcctgcctgccaagcgtcccctagcatgatgtgggcggcaagccacccaggtgccgaggcaagagaccgagggcacgagctgttccagtataataaaataaataaaataagaataattatactagatatagatcttagatatgattatatatgaatattaatcattaatttgtagcaattactctttattccaatattataataatccttgctctacaatcataacctaggaaaaaccaggccatacagagataggagctgaggggacatagtgagaagtgactagaagacaagagtgcgagccttctgttatgcctggacagggccaccagagggctccttggtctagcagtaatgccagcgtctgggaagaagcccgctgccaagctgaccgtggtctaatggtagcgtcagtgtcaaggaaaaacacctgctacttagcagaccgggaaagggagtctccctttcccccggggagtttagagaagactctacccctccacctcttgtggagggcctgacattagtcagacccgcccgcagtcatccagaggcctgtctccctgtgatgctgtgcttcagtggtcatgctcctagtccgccttcatgttccatcctgtacacctggctctgccttttagctagcagtagcaaattagtgaaagtactaaaagtctctgatatgcagaaataatggtgtaagccgtctctctgtttctcttctctctctctgcctcagctgccaggcagggaagggtcccctgtccagtggacacgtgacccacgtgaccttacctatcagtggagatggctcacactccttaccctgcccctttgtcttgtatccaatatatatcagcgcagcctggcattcggggccactaccggtctccgcgtcttggtggtagtggtcccccaggcccagctgtcttttatctctttgtcttgtgtctttatttctacactctctcgtctttgcacatggggagaaaactcaccaaccctgtggggctggaccctacaaaagatgcctcacagaagctgcgaggtgaccaatatggaaaaaggaaagcatctaacagaaaatggagacatacaactctaattttctgcaggtattttcaagaattaaagaggaaatacgtaactggttccaaacagaaacaacttatttcactaattaaaacacctgctgcttactctgactgtgctatgagggcagtatgcggggcctgtctgctctttaaaagaacattgtgttttaaggtcactttgtcacgcaatcttaactgacttaaagaagccaagtacccttcaagcttctatttaacacttggctacagtttcatactctcgagtccactcaattcccgtgtccccattctacccggtgatattgacaacaaaacaaaacaaaaccaaacaacaaaccatcagtattttctcctgagaagaaccagacagaatttctttaaaatatggctttttcagtttactcctcacaaagtaaagctctgagtactacaagcctaatttataagttaagctttatcataggaatgtctgtaggaaaaaatagtctacataaggtttagtattatccacgtttggggcatctgaggatgtcttggaatgtggccccccacaggaagacttgattaagtgccgagtaatcaatgccccaggggccgcgcgcggtggctcaagcctgtaatcccagcactttgggaggctgaggcgggcggatcacctgaggtcaggagtttgagaccagcctggtcaacgtggtgaaaccccgtctctactaaaaatacaaaacttagctgggtgtggtggcgcatgcctgtaatcccagctactcgggaggctgaggtaggagagttgctggaacctgggaggaacccaggaagtggaggttgcagtgagccgagatcgggccactgcactccagcctggtcgacagcgagactctgtctcaaaaacaaaaacaaacaaacaaacaaaaaatgtcccaagtgtcatgagctggatctgcttcacagagaggggacattctaggacagctgtggctccttcagaaaacaaagagccgtaactccttgcagaaggacgaaggtacaagtaaaggctaaatttcatgccacttatctggtcaaataaaagcctgcataatttaccgtggagcagcaccacccggttccaggtgatgaggttgctgttgacgttcttgtctgaaaacagtaaagttgtcatcacataatcgaggagctgatagagaaaaagaaaagagcttgacaaagataccaacaaggcaaaggtccccaagaaatgtgccctcccccagggcttaatcctacatgagaagagggagcacagggagcgaggccgcctcctaagagatcatcacctccaaacgctttcatttcagaagagaaggtgcttccaaaagggaaaaggaaaaacactggctattactattataaatataagaagagcaacaaaatgatcacttttatttaaagtgccaacattaaacaaaaccactaaggggtttgtttatcaagtaatgagtaagctccttccctagaatgatacagcagttattattcgcaaaataacaacagccacaatgcagaggagcagtctgagtgatagtctcagactatcaatgcagaggacagctgagtgatagtcttctagccagctgctggcatgggaaagacccttcccgttgaagagggtgcaggggttaagacacaccggcctttcctttgtgcggaccaggcttgctcaccttccctcctcccatctccagagggtttaattctctaagttgccttcacgttctccctttccctcttctccctcagggagctcctcagagaccagctctactctggagcaatactagaggatagatgtccaggacaagggctgccagcagacaggggctcccaaaaacccatctgcatcaagttgctcaggggtgttggagagcaaaacagtaatggttcctcttcaaataacagggcattctgggaaaaggcacagcaacttacatgggatttgacttccacatcgtataccaagctgtcccaaagcccatggaattcagctgtgacagaattaaacaaagacctgatttcaggaaggcaagcaattacagccacccccagtcagtctcccctgagcctaagcctgagcttcccattgtgctgctccaggcaagactatgattctgattacaggaaagtataaattctgcaaatttttcttcaaattttgatttttattaaaatcaaagatgcaaaataaatgccagtcacatgtaacttctggcagacaactggatggagtcaaagaattacactttacgtctcattatcacgcacaattgtcttttaaaaaaactttaacttcccatccttctttaaggtattgttgtcatttattttccattgacgtataacataatccccacaatatgttttcattaaactatcattttttggtggtgaacaacacattataaaatttatgatcatagccacttacaattgtcttttatccatatgcttcagcacaagtccagatgccaaatccacctgtttccccacacactgactgaatgaagccctgggcttggcctgctagagcccatccaaatccacctgtttccccacacactgaatgaatgaagccatgggcttggccagccagagcccatccaaatccacctgtttccccacacactgaatgaagccctgggcttggcctgccagagcccatccaaatccacctgtttccccacacactgactgaatgaagccctgggcttggcctgccagagcccatccaaatccacctgtttccccacacactgactgaatgaagccatgggcttggcctgccagagcccatccaaatccacctgtttccccacacactgactgcatgaagccctgggcttggcctgccagagcccatccaaatccacctgtttccccacacactgactgcatgaagccctgggcttggcctgccagagcccatccaaatccacctgtttccccacacactgactgaatgaagccctgggcttggcctgccagagcccatccaaatccacctgtttccccacacactgactgaatgaagccctgggcttggcctgccagagcccatccaaatccacctgtttccccacacactgactgaatgaagccctgggcttggcctgccagagcccatccaaatccacctgtttccccacacactgactgaatgaagccctgggcttggcctgccagagcccatccaaatccacctgtttccccacacactgactgaatgaagccctgggcttggcctgccagagcccatccaaatccacctgtttccccacacactgactgcatgaagccctgggcttggcctgccagagcccatccaaatccacctgtttccccacacactgactgaatgaagccctgggcttggcctgccagagcccatccaaatccacctgtttccccacacactgactgcatgaagccctgggcttggcctgccagagcccatccaaatccacctgtttccccacacactgactgaatgaagccctgggcttggcctgccagagcccatccaaatccacctgtttccccacacactgactgaatgaagccctgggcttggcctgccagagcccatccaaatccacctgtttccccacacactgactgaatgaagccctgggcttggcctgccagagcccatccaaatccacctgtttccccacacactgactgaatgaagccctgggcttggcctgccagagcccatccaaatccacctgtttccccacacactgactgaatgaagccctgggcttggcctgccagagcccatccaaatccacctgtttccccacacactgactgcatgaagccctgggcttggcctgccagagcccatccaaatccacctgtttccccacacactgactgaatgaagccctgggcttggcctgccagagcccatccaaatccacctgtttccccacacactgaatgaatgaagccctgggcttggcctgctagagcccatccaaatccacctgtttccccacacactgactgaatgaagccctgggcttggcctgctagagcccatccaaatccacctgtttccccacacactgactgaatgaagccctgggcttggcctgctagagcccatccaaatccacctgtttccccacacactgactgaatgaagccgtgggcttggcctgctagagcccatcagcaatgcccacggagaagcatcaagcagacaaggagccactcagcaggacagaccaagcaggcatgtgagaagagcacatgggcactctccgttagccaggaactctaaggtacccacccaaaggaacagtatggtcccacactggaaatctctactttcctcttttgtgatatactttccatttcataagagagaaaacatcctaaaatcctacaaaacaaatggacaaacagaaccccccctgtgaactgacatggcatggagtatacaatcctctgacctcagcctccccttcaactcccatcacaccccatacctgcaggtagaacccagtgatttgctgcaattatgttttctgtctcttcctccagattttcactgctggggccatcttcattcagctggaaaatgtgaagtgcaacagtgcatgcactcaaatcgatgggctaaaatgagggaaaagccaatatcgacacacatttccaactctcacttaactgcaaccatacaaattagatgttaaggtctacaaataaaaactgaatgtacagtataatcaaagctagttctcagattagatgagaaggctattattttatttcagattgaggattggctcttttgaaagctaatacccatcccttgctctttgggccctacatttacttacagaatgaaaaagtgccctaaatccagcctccgggacgttattatataaatacactcacacagatgggaccaaaaactgagttttatcatataaggttttttgtttttttttaattaacttattttttgcaacgggatcttgctttgtcgcccaggctagagtgcagcagcacgatcacagctcacagcaacattaaattcctggactcaagtgatcctcccacctccagccttctgagtagctgacactacaagtgtgcgccaccgcactggctaattttttaaaactctttttagagacggggtcttgctatgatccccgggccattctccaattcctggcctcaagtgatccttccatccttctcccacagtgctgggactacaggcatgagccaccttgcccagtcggtttcctaactgtgtctttttacatttgttattaactcagagaaatgtttacattggtagatagaaatctatttcattcttcttaatggctatattgtacatagtgtagatatatggaattcctacatttattaactgacctctggtggacagttaaaatatttcaaattgttggctattattaacagcatctaacaaacatctgttcagaaagatctacaaaattgcatgattatcagctacgataaattcctacaagtgaatctgcagtcagagaacattagaactttccctgggcagcccgtgccctccagttagggtgtccatccctccacaacagtgtgggaagctcttccttccctcagactggccaaaaccacggcattatcagatctcagtgtgcacaaagctctgagcatgcacaaacatgagtcctaacgtatgaatggggaggtccacctcacgagcagaacttagtaccaagcctgtccttcacagctggttcttacaggacaggaattgtactgctgtaagtgataagtcttccttaggaatgtttcaggttgtttttatactggtgccagaatcgccccaatgcctccacgccctcacacaaagctcctctaacccatacgcatcaactcagatggtgggtgaggtggccatgcatgggatgagataaaggaattctataaggcaagcccatcttctcatctctgtggccccacacctcctatggtcctagcacacactgagcactttataaacatttgctgattgaaagaatgagacatggcacacaggccttaccagcgcagcccactattgtacagcactgcattctcattcctggtttccaatctgttactgctatactgagagcaccccgacatcagggctacttcctactcccagcacctggctcctgacagctagtgaaaagaacttgtctagccacccaaaccaacagagaagtgaacctgtttctgacaacaggctatgaaaacggcaagacattcatgatacaaccttttgtattcagctaactgttccttggcccagcaaattagtaacttacctgtgagtctttaacctttaattctgtgtcaataatagacacagactgcacatttctggtcaaaaaaggttcatcaaactcagtccatgtgtaatcaccaaacacaatattatgtctgttgagtagctttctaacactcaggtttatgtcttctttctttgcagtgctaaaaaaagaagccaaaacacacataaatgatcttagttcaaaaacaaaatgttaaaatgaagtgttttgaaaaactcagacaatacataagaaagcccagtagttaacagggtaagttggagttggcctgcctgggaccaaatctagagccaccccttgcctgtgggtcctctaccagctgtgccctgaagaagctgtgcctcagctcccagttagaaaaaggggacaacagtaagagttctcgctatgctgggctactgtgaagtcattaatacactcaaagtgtttaggacgatacctggcacatagtaagcacgcaataatgttggctttcactattactaatgaagttccacagctgtggggtcaggcctggggtctgcattgtaacaagtctccaatagccgtgattcgtgctgagaaaatctaatgctttcagcttggtatccagggcttcccttggtcccccttgctgcagtcctcctaacacctcccctttctacaacagtgacctggtcccggatcacacctctgtgccctgctatgcactgtcccagcttactggcctgatcaactgcagtcaccctctaagtcctattcaatgtctgcctccctctgagccctcctggacaggctcctcagagccaggcaggtgacatgtggcccctttgcaatcgtcccagcaccctacaagcagcgaccaccatgcatagtgcggttgtgtgcaggtgtctatgaactctggtgcagttgtacgtaggtgtctgtcctctaggtgcagctgtgctctggtgtgattatgcctagcgtctctgggcccaggtgtggttgtacatggggtgtctctaggctgcggtggcactgtgtacaggtgtctctgagcgctaaggtgtttacacaggtgtcgccaggctgtgatggggctttgtgcaggtgtctctgggccctggtgcaattatgctgacgtgtctgaactccagcacctagaaaatacccagtcaacagctattctgttaaaggaaaggtctcttcctctgcatcccctctgaggctggtggtctcacctgacctcaatccaccctccgtggacataaggagggtctgtgaaggtctggccccgccgctgagttccccccactccagggagcagcacagcccacaggccccaccataccatgaactgacttggtcacaaatgagtgggatgtgctttgaaccctaaaaatttaacatcgagtccgtgaggaacgggaacaattaaagggtctgagaagcagtggctcaaagaataaccacccagctttcggctgagactagagctctctgtaatgcgcagccatcctattctccaacgtgggactcagggccacatcaatgcactggaggacagccggggcaggggcagggtcagggccaggtccgtgagctgaggtcgggtcggggctcaatctgtgagctggggtcctgcgcgcagggctcgggtcggccgggtcagtgccctgcggtggggtcgcgtcattgcgctaggatccggtcggggcccggcggcctgtgcgcccgggtccagtcgggccggatcagtaccctggggttcggtcgcatcagaatcagtgcgctggggtcggggctcggtgcacgcgctggggtcggggcgggtgggtgcccagaggatgtgtcggacaggtccggctcacctgctgccgcgctgatgcacctccacgtggaccgttggcgactcggccacacagggaagcgcctgcttcaggtcgcccacggcctcgtccatggcgcccccgagagcagtggggacccaaccagggcgcggccgccgccacctcacgcccagcgtcgccgccacagccgctgcctcagcccgcgggccccgccctagcttcgaatctgccgcgcgaggcgcaccacctcctgacccggaagcgctcgggcccggcagggccacttcctgccgcggccccgcctcgccccgtttccggcgcggcccagcgagctcggcaacctcggcgcagcgagcgcgggcggccagccagggccagggggcggtggcggccaaggtccgaccgggtgccagctgttcccagcccccgcctcgggcccgccgccggcgccgccatgggcaagaagcacaagaagcacaaggccgagtggcgctcgtcctacgagggtgaggcggcggcgctttgtgacgcgcggcgggcggggtcccgggcacgggggaggagttccgggcacgcggacgggggtcctgggcaccgggcgaggtcctggccacgagggaggggttctgggcacgcgggagggggtcctgggatttcgggcagggaaccgggcacacgtgaggggtcctgggtaggcgcttacgttcctggtagagggttctgggttcgaggctgcaagcccactcaccccggtcctggagactagggaagcatctgtgctggcttttgtgtggagctcagggagaagctgggctgccctttctcccgcctttccctccctctcccttgctcccgcagcagctccatgggtgtcagcgggcagcacgggcgcctgcaggaagtcaggcgagggtgaaccgaagtgctgggggtttctaggagggagatcgggctccggggttccaggtccctcttaatccatcttcttgaacgagtaatgtgaacaacatcccacagggcctctggtgaggacaccgtggctcgaaagggacctgaagctccctgcggaggggaagggagaacaaggaggcagtgacatgccgccactgtggtcttcccttccgtctttccctgctggttggcagccccgctgtactccttagggaggcctttccctcttagcaccttcacgtctcacctggctgcgtggcgtttgcacctgagcacgcgggtagaactcggtctgtgtctgtgcagattatgccgacaagcccctggagaagcctctaaagctagtcctgaaggtcggaggaagtgaagtgactgaactctcaggatccggccacgactccagttactatgatgacaggtcagaccatgagcgagagaggcacaaagaaaagaaaaagaagaagaagaagaagtccgagaaggagaagcatctggacgatgaggaaagaaggaagcgaaaggtaaaggagcagcggcggtggcccggacgctgcccacgaggagcccgtggggagcctggtcccaggacccaggcagagtgcgcctgcgtggctggaggaggggagggggtgttccgttggtagcaaaacgcgaaccgctgaggcccgcagactcagttccaggatcctgggtgtgctgttcctcagcagaccctgccagggtctctgtgaggagggagcctggcatgaggaggatctcggagggggtttcccttagttctgtccctcccctgagaactgcgaggggattgggcagacctgtccggatcccgcctactcctgcctttctcactcccttgactctgccgcccaggaagagaagaagcggaagcgagagagggagcactgtgacacggagggagaggctgacgactttgatcctgggaagaaggtggaggtggagccgcccccagatcggccagtccgagcgtgccggacacagccaggcaagggtgcacttttagagactctcctggtgttcacagctcatcgttgtaaatgaggggtcggcaccgtgtcctgttgctttggggagaagcatgggagggaggagagctggtatttccagggcctcatcccaggtgtcctctggcctgaggtttcctccggtgtctctgaatgtctagagcaaggcgtggccagttaccactggtgcccttcagttttgttttttaacttgttagctaaggatggcttatatgttttttaagcgttcataaaaagaaacaaaaaggcatctccacagagaccaatcgtatgtgacccgcaaagcctagactgttttttgtctggcctttatgtaaaaagtttgccagccctgggtcttgaagtttggttttgtttgcacttaagacagtattggaacagtagccccatctgggtcagactggtaagagagatgcatgtcagtgaaaacgcaggtaattccccttgggaagaagggacctcgaggcccaaatggtgggtctgaagttgctgaaagtgaccataggctgagacaaaggaagctggaggcctttagtagaatctctgtcgtgggcaccatctgcgaaggatggcatttggctggaatttccagttgacaaggacttgccctctgagttctctttgtccccagccttcctgtgcacaactcacagtgatgaggcatttgtacctaagacaaggggtgtctcttcccagcaactctcagcatccagtggttcctggattatagggaaacagacggctgggctttgggacatgggacatcagggagtggggaggctagtgctgcgatcattcaggccgtcagaaactgtctgaggcctgctggctccactgaaggaaagttctggaaagctggtggccttctgagctcctgtggtcatttggctcttcaggcactttctttttttaatttatttttgaaacatggtcttgctgtgtcgcctaggctggagtgcagtgtcgtgattcactcctgggctcagataaccctgggctcaagcgatcctcccacctcagcctcccaagttgctgggactacaggcacgcaccaccacgccggccatttatttactttttgttgaattttaagggacctcaagtgaaataataatcggtgaattcaggatcaacctttatgtccagagcgtttgttccgtcgtccatttcttgtctagagtagtggtatgagctgaaaacattgctaagtgatcaccacatattgttgatgtaagggctaccggttattacaagagatttttatgactcctgctgtgggggtgccctttctacccggctgagcttggtgggagccaaggctgagtcggatgtatctttatatccccagttctcggtggaacttaaaatgctgtgagacaccagacagacagatactgtgaacttggagctctctaatgaagggataccaaagtcttgtattcaatttttttttccttaaattgtcagccgaaaatgagagcacacctattcagcaactcctggaacacttcctccgccagcttcagaggtaaaccggggcgtttctgaagagctagtgtctgggggggtgtggtgtcatcttttctgaggccttattccccacgccagcctcgtcagctgtgaaacagaccctgcaccttctcttggtgactcccagtccacttcggggtgcgtaggaagagttcatgaactcattagtggctcactctgaagtcagagtagagtgagggaagtcaaggctagagctgggacattgatggccgccaggatgcgttgggggaatttttattatatctgaaatacctatcacaataaattaaaagacgctcgtaacttttttatttttaagaaacaaaattcggtcagttgtatccaatttttggattgtaagagattttgtatcatttagaaatctagatttttccgctttaagatgtctttgctttcagaaaagatccccatggattttttgcttttcctgtcacggatgcaattgctcctggatattcaatgataataaaacatcccatggattttggcaccatgaaagacaaaattgtagctaatgaatacaagtcagttacggaatttaaggtaagttactttcattgcccgaagtaatcgtggcatagttctgtgtattcatgtcttgtgaagacttcattcaccttagatcatttctagtttttgagctttcacaggtgtttctgtgttcggatgatgttttacagacacagcattaaggaaatgattggtcgtgaacgttttctctgtgctttggtctagaaactaggtcaggttgcacgctgttagaagtctgtttcttttctttctaagttactgcgctggcgtaaataggacatgttgtttcaagcagtgaggtgtccggtgtggcacggcttgagactagacatttttaaaaacatacttctttttaattcttagttttgtcttacactaattgagcatttagtttttttagcatagtaagtttttctgtctcctgagtactttgctcttagctctgtttcttgctactggctgtgagaattagcaactgctcattggttttgcaacccaggggaagaaagcaaaacaaatgcttgataaagttggcattagtgtagtttagaaaggcattagatttctctcttaggttccattcccctggggaaagcttgacttttctattttatgcttactgaagggtttgctgactcacagaaacacaacagaacagacttaaaggagagtgggagaaaaggaaactcgatgagaggatcaggcagcgcctgagggtagatgttaagagcactccatgcccgaaagccctctgtattccctgcttcgggccccagtctggccattcctagcaacaaagtgagaaggggagcagcattcactccgtggagtgtccgcagtggagtcttcaggggaggggctccacagcctcgggccgggccctagggctgctggctctggaaccgggacttggggagggtccagatggcacgttctcagttagggtggccggcctccggggtcatgctccagcctgacgttggtactcacctttgagaggcctgtgctgaggaaactggcctctcataataaaatactgatgcttccgtattttcaccataaattacaaaataaggttgtccttttgtggggcaaagtctttttctagtagtttgagggaaccatttggtgacagaattttaaattcgattctgtggagaaattctagagatagaggctatcactgtgccgcacgcctgccttcatcccttgacttgcacttgaaagaatcgggtcgttgcttctcgttcctgtttatgttctggagaaatgcaagaagcgcaggaaacgctttttcctcacacagcatttgtatgtgatgcttagaaagaagttacaggcttggccaactgtttgctgtaatatttttcatgcaagaccaatgtgcaactaagaaaacttctcttaagttcttaaacgttatgtttagatcagagagcccagttgaattgttttctactcgattgtagctttttccttttggtctcttggtagtcatctagagctttgctgttgtctgtggcatttcaaacctgataagtctttcctgttttcttttcaggcagatttcaagctgatgtgtgataatgcaatgacatacaataggccagataccgtgtactacaagttggcgaagaagatccttcacgcaggctttaagatgatgagcaaagtaagaaactcactggcagcagcgagctacggaaagcaggggctctgccccccgtcgcttgtgcccgaagggagcctcacagtgaacacgtgctccatccacccgccaccctcatggtgttgccccctttgctctagggtagacgtccccggccgccctctctgctcatgacctagctgtaacatctcattgagggttggtggaaagttccgcatctcttgatcttaagcctgggtgtcaggtgtcagtcttgctggatggcagccagcattgcgggcttgttttgcgtgactgcctcactgaatccagacgggacatccttgtcttccttggccatcctgagtggcttcccagatctgtgccgtgagccaggctgcatgcatcccacgtaggagaaggtaaaggggaggtgcggcacctgccgcgctctggcggtgggtcaagcccccacaaccacctcccgctgctccgccgtggaaagttagctcttaggccaggtgaggctgtgaccatccccatcccatcccatcgtcacggcaccctggctgtgagggagaggtaaatccctgctgctctgtcctttctgattctaggagcggctgttagctttgaagcgcagcatgtcgtttatgcaggacatggatttttctcagcaggcagctcttttgggcaatgaagatacagctgttgaggaacctgtccctgaagttgtaccagtacaagtagaaactgccaagaaatccaaaaagccgagtagagaagttatcaggtaaaggttctgtggaaaccacatttgcttttggagttgagcaccatagccaggaaagcaggtgccttgtaggggagagtgagtgagtgagagaacggatgtcatgtcacatagacattcttggtgtagcttattctggcaggaggagtgtggccagacagcccctcctgcccaccggccacgtgcactctctgacccaggtgtggtacccaagcccgtccgatcacccctgcccccaactgctagtgactggtggtctctgtctctacacgccgttaagatcattggcccctccctcccctgcacagcgcctgccggcagccaaggctgtgcccttgtcccagactgtgccgcacaagcgggctgactttgggcagccagcattggcagggggcttctttgttgctgtggggcagatgcacactcctgaactgctcgcttctgtgtctgtgtagacgctggagtggagcaggtgcaggcctgtggtcaggaaggtgtggatgctgcgggggaagcaggtgaggactgcaggccacagctccctgtagctctgctccctcccacagggagcagccgacttggctggtccttcagggaaccttcttcctttttttctaaaccccagagtggttttcatgggggctctttgtctcatggtggctgagcattgagattgtatcaaagtccgtatcacacgtcattcctgtagacgctcctccacctatgtgaggtggctgcctgataggaccaaacaaagcgagagtatcgccaggggccttagaggcaccaagagcacttaacatagcctgcagcgggcagaagcgcctggcacagagcctgcttcatcacgtgtcacttgctgagtgcaggccccagagagcgcagtctcaggacatccaccctcatggccgtgtgtctgacagcactgtggctcgcggtcttcccagtatcctgagaggactggcctgttgccatcctggggacagatcagatttgaaggatggtttctgctgaagtgtattgcttttgtgccatcttgtgggaagtcagggaccgtctggagttggtactgaacgtccttgaggcaattgtgatggtcacggccctccattgtttgtttccttctcacatgtgtatgggactcacgtggatttaacaggtggggcggcagcggtgctgggctcggtgcttctgctctgagcagctccctccaaccgtcaaaagggagagtggtcttgagaccagcccctcaggtcctgcagccttggcttaggagacagggtgcgctgcgtggccagagtgtgttgcttggcaacggacgacagtcccctaaggcggtctccccacgtgcgttgcatttcccaccccgctgccgtgtgaacactcactgcgtggttggctggtggctgtgtccggcctcagcccccgactcgagtgtgctgctggccttcaggggtcggggtttcatggccgccctttgccgcctcatggtgactgagcatcgagggggaattgaagttggtgctggtcagcatgctcagctgcggtggggttgtgtcctggcagacccaccccaggttggttttgggtgtctctggtgctgcagcttcacccttgcctgtgggatccaggccctttagatggatccccagctgtcagtctgcaggcaggagagcgtgccgagctcaggcagtcaccttcacctagtgtcacagcagtgcgcatcggtaatgggctcacgcaggtgcctgagtggagcccctccctgcggagctcatggggctgtgactcctgtgtagggttgccaggttgtcactgtaggtcaggcaagggcagggccgctctcatgggcagggcttgtcctgggcctgcacctggccctaggccactcagacccatgcccaggcaagtgcccagggtgggaaggagcccactcgcttgcttctagaacc

SEQ ID NO: 620 - DNA, 1838 bp, Homo sapiens
agaaggagctggaccctgacgacagccatttgaacttggatgagacgacgaagctcctgcaggacctgcacgaagcacaggcggagcgcggcggctctcggccgtcgtccaacctcagctccctgtccaacgcctccgagagggaccagcaccacctgggtgagatgcccccacccacgccgcatccccagagaccccagcacagtcagtgtgacgtctagacgaggtagtgggcagcattgtagttgtgggaaggctggaggctgcatgggcagcggtgctgttgtggaggtcggtttccacagatgtccttgggtcgcggcctcggtgcagagccggagcggagctgggatgctggcctggccgcacgctgggttacaggctttctgccagataccgtccccagttctgtccacccctgtgccctctgtggaccctggttccagtgtttctgctggggagagagcatggcttccttggccatgtgtcctggagtggttttggtgggtggggttttgttcccacttgtaaacactggatcactctgtcggcagagtgaatcttggcagttcttcagctgcagaggtttagctgcaaccatctgcaaaaaggccggtattttcgattccattgaccttgtgatcagggtgttaacagtgcatggagcaggctttggagggccgtaggtcaaagtctgaggcccccgatatcccagtatgactttgggaactgccctgaggtctgggctgtgtctgagggactcctggccaaggagcgttctctccttcagaagcagcatccgtgctgtgtgctgggtcagggcgacccctggctccagggtctctacacacagctctccttggcagggagtgagaggtgcccctgtgtcctgggagtccctgagccctggcggtaggtcaggaagcagaccttgggctccaggagccccacgtgtgctgcgggtctgtcctgtgtgttgaagtcctgtgttctgaaaattgcaggaagcccttctcgcctgagtgtcggggagcagccagacgtcacccacgacccctatgagtttcttcagtctccagagcctgcggcctctgccaagacctaactctagaccaccttcagctcttttattttatttttttagttttattttgcacgtgtagagtttttgtcatcagacaaggactttgatcctgtcccctttggcatgcgggaagcagccgcggggaggtaatgaattgtctgtggtatcatgtcagcagagtctccaagccccacgaaccctgaggagtggagtcatacgcgaaggccatatggccatcgtgtcagcagagagagtctctgtacacagccccgtgaaccctgaggagtggagtcatacacgaagggcgtgtggccatcgtgtcagcagagagagtctctgtacacagccccgtgaaccctgaggagtggagtcatacgcgaagggtgtgtggccaggctgcagagctgcgtgccgtttgtgtccgagcatcacgtgtggctccagcccttgtttctgccagtgtagacacctctgtctgccccactgtcctggggtcgctcttgggaggcacaggcatgggtgtgtctggcctcattctgtatcagtccagtgtgttcctgtcatagtttgtgtctcccaggcaggccatggtaggggcctcgcaggggccattggggagcacagggccaggctggggtgaggagagctcccctgttttctgtttaattgatgagcctgggaaaggagtgtgttctgcctgcccgttacagtggagcgttccgtgtccataaaacgttttctaactgggtgttta

SEQ ID NO: 621 - DNA, 546 bp, Homo sapiens
cggtgctctgtgtggcatgggtgagcattctcaggtccttcctgggccctggtggaagtgggagcaaagccattgcctctggacagagcatgaagaagccacagtagctgactcacaggaagagtttgtgaacagggctcagacgaggggcagagcctgggctgcaccctccgtgctggctgggaagcagactccacgcttgtctgcacagctgcacctgccatcctgtccctggatgccaccaagtgcaccgttccagtggctgcctgcaggctctgctccccacccccaactctgggaggacgcccttgctgcagggaggctgggaaaggcagcatctgcagtcccaagctcagtggggctgtgtaccgcacccagcttccactggggctccagaggccaggattcccttaacaggacagacacttcccacagccgggtccccagggtacagccttggagagcttgggctcaggaacaacgtggctcctgacagcaggttgctgtggagtcaggtgtcctcccaccatccgatctctgaacacc

SEQ ID NO: 622 - DNA, 546 bp, Homo sapiens; identical to SEQ ID NO: 621

SEQ ID NO: 623 - DNA, 847 bp, Homo sapiens
ccaagatacaaatcgggtacagacattgggtaaatagacctatcccaagagggagaaatcagccaaaacaaaggggcagcaggctacaaatctgaaacccagcagggcagtcattacatcttgaggccccgaaagaatcttctttgattccttgtctcacatccaggctacactgatgcaagggatgggctcccacggccttgggcagccccgcccttgtggctctgcagggtacagcctctgtggctgctttccctggctggtgttgagtgcctgcagcttttccagatggcatggtgcaagctgtcggatctaccattctgaggtctggaggacggtggcccttttctcacagctccactaggcagtgccccagtgggtactctgtgtggggtgagggctccaacctcacatttcccctctgcactgccctagcagaggttctccatgaagggcctgcccctgcagcagacttctgcctggacaccctggcttttccatacatcctctgaaatctaggtggaggctgccaaacctcagctcttgccttctgcctacccacatacccaacaccatgtggaagcttccagggcttggggcttgcaccctctgaagcatcgacccttttagccctgtaccttggccccttttagccatggctgggacacagagcaccatggcacatgtcccagtgcttcacagagtagtggggcccttttccctcctagacccccaggcctgtgatggcagtgtctgggcaaaggtctttgaaatgtccctgaggtattaacatttggctcctctttacttacgcaaatgtctgcagccttcttgaattcctccccag

SEQ ID NO: 624 - DNA, 1623 bp, Homo sapiens
gactcagcagtttactctttcatcaataatgcactcactctgaagtggcaggctggacactgtggcccagctctgcatgggtgtttatagtttatgccagtaaatgtttctgttgaatctgtcaggagctgcaggcctgatcccttttcaagttggtggtgagagcagtgagtcagcatatttgtaaacttcagaagagtacagaacactgataatttactgtggcactggtaatttcatgaatatggagtgggcccatatgttcatttttagctctgtaaatctcaagaactgttactgccttggtaagctgtatcagtgcattggcacccagataaagagaactttctgcctgtcttgaagtaaatgaggcatcaacccagacttgtgttaggctggcctttgctgtggttttacagtagatgcttcagaactgcttagaaagctcttttcagatgggaatgtgggttgccttctggtagcatggcctgtcatcagaggtgtggttcccccagtagccggcctatgacacggcggctccagtttctttatgtaataaggtgagaaagagtgaggaagagttgtacagagcaaatgaattcagtgtcgatgtcttatccagtgagcgttgctatggaaaaacctgtttgaaaacaggttcttcccattaagttcatcagttttatgtttcatttttttccttttggcctttttaggaccagttccaagtgcaggcagagttcccctaggacttctgactgtggaccttcagcagcctccatgatttcatccttcctgctcgggtccctgttaccaaaaatacagggcccttattttcatatttgccccggattttttccttgcaagagtttcttgatagcaaatccttcttttaaatactagaaagtatgaggaagcgttctcttttcatagccagtgatttaaagaatagttatttttaaagtagactagtgggcttttagtgttaaatgtctattgatgttttgccagaagaaacattgatttttctcttactttctctttttcagggcctgctttcttccccgggcgatgtgcagagatctttgccaggggtcaaagcgtcgggaagcttggggtccttcatcctgacgttatcaccaaatttgagctgaccatgccctgctcctccctagaaatcaatgttggaccctttttgtgaagattggtctctgtggtgtgattctcttcccaggtgtccctttctcctcccctagtgtccttaagtcctcctccacagggaacatctatttgggctttgatgtttaataaagtagaaagcactgtctggctgtgtgggtagagaccatcctttccctgcatattaggccagcttgtgccatataccagtgtggtgtctgtgtgtgaagctgcattgttgggtaaaagccccgtggagtgctggagaaatgcactagcagagtgcaggatctgttctgaaaggcagacgtgctcctcagacatcagaacatcacattggaacggattactcctgcataacaagatcccatttctttccttattgataaaacaagataatcgatgagaattcatgttgcatgagttcgagataactgaggggtt

SEQ ID NO: 625 - DNA, 644 bp, Homo sapiens
gactcagcagtttactctttcaccaataatgcactcattctgaagtggcaggttggacactgtggcccagctctgcatgggtgtttatagtttatgccagtaaatgtttctgttgaatctgtcaggagctgcaggcctgatcccttttcaagttggtggtgagagcagtgagtcagcatatttgtaaacttcagaagagtacagaacactgataatttactgtggcactggtaatttcatgaatatggagtgggcccatatgttcatttttagctctgtaaatctcaagaactgttactgccttggtaagctgtatcagtgcattggcacccagataaagagaactttctgcctgtcttgaagtaaatgaggcatcaacccagacttgtgttaggctggcctttgctgtggttttacagtagatgcttcagaactgcttagaaagctcttttcagatgggaatgtgggttgccttctggtagcatggcctgtcatcagaggtgtggttcccccagtagccggcctatgacacggcggctccagtttctttatgtaataaggtgagaaagagtgaggaagagttgtacagagcaaatgaattcagtgtcgatgtcttatccagtgagcgttgctatggaaaaacc

SEQ ID NO: 626 - DNA, 386 bp, Homo sapiens
ccttttttttttacattactaatacatgatgtgaggctcgaaccccacatattgtactgcttgcaatctgatacttaaccacccaaaatttctgcaataaagagataagaccaaaatataaaggggggggcagggaacactggaaaaggaatgtccttatgtcacatatgtcatagcaaacaacagaaactatcatcatgagttttaactatacataagtctccaacttcagggatgaactaaaaaaatacaaaattatatagatattgtaagccactgggccaactgaatgtactgtaaatatgttctaagtgagtaattatgtactatggagtgaagggaggaataatcatttcacaggctgattcgggggctggcatctaccc

SEQ ID NO: 627 - DNA, 179 bp, Homo sapiens
acaattaccctgtttctgattactacagcccaacccgggcggacaccaccaccattctggctgccggggctggagtgaccataggattctggatcaaccatttcttccagcttgtatccaagcccgctgaatctctccctgttattcagaacatcccaccactcaccacctacatgtta

SEQ ID NO: 628 - DNA, 2493 bp, Homo sapiens
gtccaccacattctttccgcagtggatgtaaagctggatcccgccacggcgcacccgagtctgctcttgaccgccgacctgcgcagtgtgcaggatggagaaccatggagggatgtccccaacaaccctgagcgatttgacacatggccctgcatcctgggtttgcagagcttctcatcagggaggcattactgggaggttctggtgggagaaggagcagagtggggtttaggggtctgtcaagacacactgccaagaaagggggaaaccacgccatctcctgagaatggggtctgggccctgtggctgctgaaagggaatgagtacatggtccttgcctccccatcagtgcctcttctccaactggaaagtcctcgctgcattgggattttcttggactatgaagccggtgaaatttcattctacaatgtcacagatggatcttatatctacacattcaaccaactcttctctggtcttcttcggccttactttttcatctgtgatgcaactcctcttatcttgccacccacaacaatagcagggtcaggaaattgggcatccagggatcatttagatcctgcttctgatgtaagagatgatcatctctaaaattctgttcccaagatgcagtcctagcgtagcgaacgttcctggagtggggtgaaggatatcaatatactaagttttaacagataccccatttaggtcagcacttgattcgttgttgctgtgaaatatgtccatgggacaaaagagggaatatgaaatatttgcatatgggaagattatagagcataataattttgtaaatggagcaatctcaacctctatttctagatcacattttcttgatgtcttccttcaaattaatgaccttggattacataaggatttctatgcattcattataatttgttattcctttcaatatccttgtatttcaaatcttccatataagaattagacatggcaattcttaaattgattcagaatggtctgatactattccagtatcacctccttaattctgtttctcctcgttttcctgattttccttctcattctctccttccccgctctgtctctctctccctgtcactctctctctcttgttccttattttttgtttcttacctcttactgtttaacctgttgcttccttctggattaatacatttagagccattcctttatatggtcacatttcctatgactttactcaattacttttaaaatcctttctattctgagactaatttttaagaattacaaagctcattcttctgaatctaatatcactaactcctagactttttccgttttctttggatacactttaagtaggaatttatcagaattttcattcaactcgttctttaatgcagatatttactagttataagaccttaaggctgggtgcagtggctcacgcctgtaatcccagcactttgggaggctgaggcgggtggatcacaagctcaggagttcaagaccagcctggccaacatggtgaaaccctgtctctactaaaaaaaaaaaaaaaatagaaaaattagctgggcatggtggcaggagcctgtaatcccagctattctggaggtggagacaggagaattgcttgaaccctggaggcggaggttgcagtgagccaatatctcaccactgtactccagcccagtgcgagactccatctcaaaaaagaaaaaagacctcaaacaacacttctctctctcttttagctgcttgttatggttcctatacatggaacaattatactggcctcactgtgttatggtaaatatttaaggtcatatttgatattgctggtttgaattcagcttttccatttaaatacattataatgatgatgatgaaatcatgataatatttaacttatttttaaagtatattctgtacctttccaacaaaaaggttaaaagtcattgaaggctaaccttactgccttctttgtatcactgtcttctaaataattattatgtctgggtacagtggctcacgcctgtaatcccagcactttgggaggccgaggtgggcagatcacgaggtcaggagattgagaccatcctggctaacacagtgaaaccccgtctctactaaaaatacaaaaagaaattagctgggcgtggtggtgggtgcctgttgtcccagctacttgggaggctgaggcaggagaatggcatgaacccaggaggcagagcttgtagtgagccgagatcgcgccactgcactccagccggggcaacagagcatgactccatctcaaaaataaatatatcaataaataaataactaagtgaataaataaatattacacaaatgctaaaatgtttaaatggtaaatgcttcaatgctaaccaaatattaattaatggcaaattatttaacattatctgataataatctgcagaaggtttaattttcctcctcaatttgaagttcaagatgtttttctcttacagggagattttt

SEQ ID NO: 629 - DNA, 1712 bp, Homo sapiens
tttcctgattttccttctcattctctccttccccgctctgtctctctctccctgtcactctctctctcttgttccttattttttgtttcttacctcttactgtttaacctgttgcttccttctggattaatacatttagagccattcctttatatggtcacatttcctatgactttactcaattacttttaaaatcctttctattctgagactaatttttaagaattacaaagctcattcttctgaatctaatatcactaactcctagactttttccgtttactttggatacactttaagtaggaatttatcagaattttcattcaactcgttctttaatgcagatatttactagttataagaccttaaggctgggtgcagtggctcacgcctgtaatcccagcactttgggaggctgaggcgggtggatcacaagctcaggagtttgagaccagcctggccaacatggtgaaaccctgtctctactaaaaaaaaaaaaaaaatagaaaaattagctgggcatggtggcaggagcctgtaatcccagctattctggaggtggagacaggagaattgcttgaaccctggaggcggaggttgcagtgagccaatatctcaccactgtactccagcccagtgcgagactccatctcaaaaaagaaaaaagacctcaaacaacacttctctctctcttttagctgcttgttatggttcctatacatggaacaattatactggcctcactgtgttatggtaaatatttaaggtcatatttgatattgctggtttgaattcagcttttccatttaaatacattataatgatgatgatgaaatcatgataatatttaacttatttttaaagtatattctgtacctttccaaaaaaaaaggttaaaagtcattgaaggctaaccttactgccttctttgtatcactgtcttctaaataattattatgtctgggtacagtggctcacgcctgtaatcccagcactttgggaggccgaggtgggcagatcacgaggtcaggagattgagaccatcctggctaacacagtgaaaccccgtctctactaaaaatacaaaaagaaattagctgggcgtggtggtgggtgcctgttgtcccagctacttgggaggctgaggcaggagaatggcatgaacccaggaggcagagcttgtagtgagccgagatcgcgccactgcactccagccggggcaacagagcaagactccatgtcaaaaataaataaataaataaataaataaataaataaataaataaatattacacaaatgctaaaatgtttaaatggtaaatgcttcaatgctaaccaaatattaattaatggcaaattatttaacattatctgataataatctgcagaaggtttaattttcctcctcaatttgaagttcaagatgtttttctcttccagggagattttttcgactgacatctttaacttaccttccaatcatattactaacgtagccttcttcctagattttttaattgtttgatcatgagcgaacacttctactctctgtgatagatttgcaaacagaggaaataacgcatcctcgtgtccctcttcttggtgttccacaggccatgtgtgccctagccctcgttcatgcaaggtctgtgtagggaaggtggacttcagctcagcaacagcatcccttcccacagggatcaggtgggtgg

SEQ ID NO: 630 - DNA, 1516 bp, Homo sapiens
aggtgggtggcttgagataccccttccatggggcaccacccattcagtgagacggggaagccctgggtgggagggagaacacctccacatgtcttctactctctccataggatggaatgagtgtcccagtcccaggagtatccatttcccactgtgtagcccagtactctggtctcactgtctctgctgaatcctgtctcactgtgcatattattgtggtttatatcagtcagtaaaccaatgtgagtcttcatctcttgcattcttaggttcatagttttgtgtgtctcctgtaatgactcttctctttccctttccaactcctgaaagattgccactatttcctctggaactttgtttcgttaccagcaaaatcctcgacatccatacccgtttcctggctttccctctcctttcctctgaatggtagtcttttatattcagctgtccacttgacatcaaaatagacattttgaactcaatttgcctaaaacttacccacaaatttctccccaagtctctccctaactgcaacaacaaaaaccacaggcttctccctgtcactggatggcaactccattcttttgattgcttaagccaggcatccgattgagtactttcttgatttctccagcccacatccagtccatcggcaagccctgttggtcctaccttcagaatatgtccggggttcagttgtcctggccaccctgctgctgtaaccatggtcagaactccatcctgcccctctggattatgactttcgtttcctcacagtggtcctgcttgggctctaggcccttccactcccattctctctacagcagctgggctgattcctttagcacccaaggatatgttggcatcacagtgacttagataccatcacaaagacctcccattcaacttagagtgaaagtcagaatcctcacagtgaatccccaggccctagaggatgtgaacccccaggccctagaggatctgaacccccatccctcctctgattatctctcccacccccacttccctttgcattctgctccagctgccctggcctcatggctgggtttccaccaaagcaggcacttcccatcacagggccatttccccgcctgtggcttctgcttgacattcccttttccctgatatccccttgactcattattccctttcttccttaactcttctgagatccagcttctcagtgataccacacagccctactccccccagagcccatctagagctcacctttccagtcgcccttgccaggctcagtggaggctctttgttccccatacagtacgtgtcgtcgtactatattgttaggcttatttaatttatgtatgttttgcctttttgtgctaaatgtaaacaccacaaggggaggtatctttgtctgttgacaatgatacattcaatgtttctcaagcacccccaatgctggtttgtatgtggttatcattcaatctgtatttgttgaatgaataaatgattgactatgtggagagcaaaa

SEQ ID NO: 631 - DNA, 216 bp, Homo sapiens
cacaaataaactttaagctcctgaaattatgttatgtaaggtatttgagaaatttgaagtaaacttgaagaaggtaaatgaactcatcatagggaaggcacatacaattgaagggagaagatagtttgttcaagaaccaagtgaaggctagtgttttcagattccatacattattcctctgtagagttacaagctacattgtaatggaagaagaaa

SEQ ID NO: 632 - DNA, 3802 bp, Homo sapiens
tttcttttctttttttttttttttttttgagacggagtctcgctctgttgcccaggctggagtgcagtggcacagtctcggctcactgcaagctccgcctcctgggttcacgccattctcctgcctcagtctcccaagtagctgggactacaggctcctgccaccacgcccggctaattttttgtatttttagtagagatggggtttcaccgtgttagccaggatggtctccatctgctggcctcgtgatccgcccgcctcggcctcccaaagtgctgggattacaggcgtgaaccaccacacccagcccattttgtttctttcttatataagcatttcttttctaattatctaaaatacagaattatttactaatcaattttagtcaatttaaatatatttttattacctaaaaaacagaaaaatattgcaaattaactgaataggaatagtattatagagtattatctatataattttgtcaaaaatgcttctcttactattaaatagaaatatttctggcatttgggattctataaatcttaagcaatgttctgcctttgattttcaaccatatcgatcactttacatccctgatgaaaatctttcaatgactccccattaccaccatgataatgtctaaactcttcacatccccaaaagccctttatgatttgacttcttgtgaccactttgaccttctgtattgtcactctcatgttgcttgggccaggcctactctctcttacctgagcccacagcctacaatgcctctctcaccttttcacctctttctccgtttacatgctgcctccttctggaggccacctctgatctccctatcttagaatgtcctttgcatagcacatattacgccatgttataattcctatttaattatctgcctcttcagcagatctgtaaaatttttgaaggcagagactattttattcatcattatattcccataacctgctatgatacatgcctcccatattggaggcatttgatgagtatttgttgattgaatgcatgaatattaaaatggtaattatagaggaaggtggagtggtatgcccctatagtcccagctgctgcagaggctgagccaggaagatcacttgaacccaggagtttgaggctgcagtctgctatgatcaagcctgtgaatacccattgcactgcatcctgggaaacatagtgagaattggcctctataaaaataattataatagtaacccaaagcattcaggaatcatgaaatattttccgaatcaaaaagaaagatcaaggtattataagtataattttaatatgtgtatcattcgtctattcataaatatactaattaatgtttatgctaaatttaatgactttttaaattagaatatttgttttatgaaataagagatttttaattataatacatagggctaacaaatatattgatagggacctatttttctgtgtattatacttgttcgatatgctataaataactgttcctcacttgattattgatttagtatgatatatgtcttatattctcaaattatttatttgaacagttctaattacatctattgtatcttcaaaattgcatttttaagaagctgcagttctgacagcttagtggaaaatgtgctgatatgaaaatatattcaaaactgaagatttgtttgaacattgtatttattagctcataaaagataaaaataaagccctagggtaaattctagtttctgtaaacaaaccttaaattatgaaaataaaaccttacttttctcttaaaatattcaaaacattaaaatagtaagagaaagttaagtcggttttccccctactcgttgagactacacaattcacttgcttttcctctaaattaatacattattattttaaaatactgctgcatttaagtatactcatgaatcatattattcttcaagtaattcagaagtcagaagagaactctaagcttagtcactgagcattataaatacggacatactcataattaagtatgtgagtgtaatctttataaaccccaacatttttaaaagtattttaagtggcttcagaacagttaaaaagttaatatgtggccatgtaattcatagtaacaaatcaaacatgggccaaagattttgtgtcatgttttctggtagcatacatgggaaaatttctatttcttcaaagagaaaccgccaaaaggtggtacttggttctgaaagagtattttgcagaagtgttcatatagagtttaataaataatgtaataaataatgttctctacatatatcaaatgtaaatatactatcagtttttaggcttttaataatgaaagctgagagtctgcgtcgcttcggatcatgataaaaaaaccccaaaatgaccatgacttaaaatattttttttcttatctgtaaaaagttctgaaattaggcagtacagtgtcagttggtgactccataaatatttccagtactcacctaccttttgtttctttccataccatgcctaagatgtggccctcatcctcatagcccaatatgactactagagcaccagccatcagatctaatttccaggtaaaatggtgaaagaaaggccgaaaagagcggctcctccctgcttcctttacggacactttctgaagtcacaaaagcacttttatttaacatcatttgctgaaacttaagaatacggtcacaactaacttcaaggaaagctagcaagtctagatttttagtcaaaattttgtcaatagaaaggaaagggggaatgtgctccgatagtgactggcagtgtctacaacatacaaccagaacccacttcaacaacatcagttccatgggggacaaatgtgtttgaaggaggcagtttttagatagtctggttgaatccagagataaaagctatgtctagatcagcaattttcaggtcaacaacaatttactgagtatctaccttgtgctagatagttgggaacacaacagggagctgaggtcatgatttctgaccttctaggacttataatcaatttttagcagtataacttaaaaaaaaaagctaatcaagaaactcagtactcaatatgtagactttagagagaggcctctgatgatttgaggattcattattgaagattttgccactatgagttatatatggaaacaactattattccataaaaatattcatctatgaactgattatatatttaatccctacacaaacatttctccaagtttaacattaatatctgtatctccatttaacaaagcaatgcctttatcaatttcccctgcctaatgttatttacatcttactatataacgtaagtaaattgaaaagtgtaacatcgaagccttgcaataaatgctagatttcatgaattttatgtaggtgctgttggagaattgatcaaattatatgcaaagctattggcaaatgatgacgtgttagataatgcttctgctacgtttcatagtaaccaggttaaaatttttttttttttgagacggagtctcgctctgttgcccaggctgaagtacagtggcatgatctccgctcactgcaagctccgcctcctgggttcacgccattctcctgcctcagcctcctgagtagctgggactacaggtgcccgccaccacgcctggctaatttttttgtatttttagtagagacggggtttcaacatgttagccaggatggtctcgatctcctgacctcgtgatccgcctgcctcggcctcccaaagtgctgggattacaggcgtgagccaccgcgcccagcc

SEQ ID NO: 633 - DNA, 679 bp, Homo sapiens
ttcttaaaaagggtaggttgggcgcaatggctcacacctgtaatcccaacactttgggagtctgaggcgggatggtcacctgaggtcgggagttcgagaccagcctgaccaacatggagaaacctcgtctatactaaacatacaaaattagctgtgtgtggtggtgcatgcctgtaatcccagcgacttgggaggctggggcaggagaattgcttgaacctgggaggcggaggttgtgatgagctgagatcacgccattgcactccagcctgggcaacgagagcgaaactccgtctcaaaaaaaacaaaataaaacaaaaaaaagcatgctaaacaagagtatttgtactgaattgctgataattggtgacgatgacatctataagtttgtcattgtctacatgagattaatttaagtcctttttaggcaataaaaattatatgtttgaaatcttagcaggttatatatcaacattagcaatcaagattgcacctctctgcatcatatatacaaatttctgattacatgtagattactattagaaaatacctagcacccactgctcaacatgtagatgtgtgtatatatatattcaatatatatacacaatatatatatataaaatatatacacaatatatataatatatatacacaatatatatatacaatatatata

SEQ ID NO: 634 - DNA, 523 bp, Homo sapiens
aaattttctacggggctttgaagaaaaggggataaagaacgacaggcctgaggaccagttgagcaaagagaaaaagaaaattcttttctccttctgtgaggtgtgcaacatccagctgaactctgcagcccaggctcaggtgcattccaacggcaaatcccaccgcaaacgagtgaagcagctgagtgatgggcagcccccaccacccgcccaggccagccccagcagcaacagcagcacaggtaggaggcagggtcccgggttccatgtgctgcggggagagatggtcctggtctggaaaatgaaggatttagaacaagacttaatttttaccttaaaactgggctaccatgataacatgtactctttctcctacaggtaaaatacatgagctgtttgtcacctctcgaaatatttgttacacccactgacatacacactggcacacacacatacacacatatgcacaatttgtatatgggtccagagacttcctgtatccccacaatgtgtgaacacttct

SEQ ID NO: 635 - DNA, 523 bp, Homo sapiens; identical to SEQ ID NO: 634

SEQ ID NO: 636 - DNA, 399 bp, Homo sapiens
tcaggaatttttgcatttctgcctctgccctgaattctaaacaatctttcaaatcctttatcttatccttgggcagcccctcctcttccacattgctggtcactgggtatcttcactgtgacagaattaaagaaaaatgtgaaatttattgttatccatggtgaagatttctacaaaagacagtcttcctcccaaggtttgaggtgggaggccaagataagcctcctcccaaatgtgggggaagagctccaaattctactctagcaagggtttgctctgtaatgaggccccagcttgaagtgagatgatacagagaaaacatttgttggaatttcactcagtgctgttacatggttcttggtgtgttgtaaataaattatttttatatttcaagccaaa

SEQ ID NO: 637 - DNA, 399 bp, Homo sapiens; identical to SEQ ID NO: 636

SEQ ID NO: 638 - DNA, 326 bp, Homo sapiens
gacttccagtacagtgtttaagatcagtggtgaactgggatatcccagccttgtttataatcccagcaggaagactttgagtttctcaccattatgagtgatgccagctgtaggttttttgtagatgttctttatgaagttgaggcagttcccctctatttctagtttgttggagtttttatcatgaatgggcattggatttctgccagatgctttttctgcagctttctgttgacatgttcacatgatttttcttctttagcctgttgatgcgatggatcacattaattgattttgaatgttgaaccagccttgcatacctgtga

SEQ ID NO: 639 - DNA, 326 bp, Homo sapiens; identical to SEQ ID NO: 638

SEQ ID NO: 640 - DNA, 303 bp, Homo sapiens
ggccgggcgcggtggctcacacctgtaatcccagcactttgggaggctgaggtgagtggatcacgaggtcaggagatcgagaccatcctggctaacactgtgaaaccccgtctctactgaaaatacaaaaaaaaattagctgggcatggtggcgggtgccagtagtcccagctatttgggaagctgaggcaggagaatggcgtgaacccgggaggcagagcttgcagtgagccgagatcacgccactgcactccagcccgggcgacagagcaggactccgtctcaaaaaaaaaaaaaaagaaa

SEQ ID NO: 641 - DNA, 169 bp, Homo sapiens
accatggccatctttgattttctgacatttgaaaactatatgcctaggctcaatgtcttgagtttcctggatctgtgatgtggtgtctgtcattaatttggggaaattctcagtcattattgcatcaaatattgctgcttttctctcttccccttctggtgtccccatt

SEQ ID NO: 642 - DNA, 169 bp, Homo sapiens; identical to SEQ ID NO: 641

SEQ ID NO: 643 - DNA, 281 bp, Homo sapiens
atctgtaatcccagcactttgggaggccgaggcaggtggatcacgaggtcaggagatcgagaccatcctggctaacacagtgaaacccggtctctactaaaaatacaaaaaaattagccaggcgtggtggcgggcgcctgtagtcctagctactcgggaggctgaggcaggagaatggtgtgaacccgggaggcagagcttgcagtgagccgagatcacgccactgcactccagcccgggcgacagagcaggactccgtctcaaaaaaaaaaaaaaagaaa

SEQ ID NO: 644 - DNA, 14337 bp, Homo sapiens
caggcttatatctgggaaaaaggtcatttcagggttcagccactgccacaaatagtatactttttgttttctgttatcagagtgagtctgtcagctacatctcattttcctcaggtctcagtccacactggggaacaggaaatgttcttgcaggagacggtacgtctacgaaaagaaggagaacccagtatgtccctccagtccatgaaagcccagccaaagtatgaatctccagaacttgaatcccaacaggagcaaggtaaagaagaaagacccatcttgggaggaaggggaagatgggtaacataggacattggggcttttttgtacttgctactgtttctgatcattaaagtcaaaaaggccgtctcagaatctgatggctcatatatagactctcagacagcctagtttgtcactcttcaacccttacttttttgtatattcatattcttctaaattctggctttaccacttaatttagtccttctgatatttatctctctttatactgacctccttgctatttttagcctttatcctatcagacaatacctctatcttccacttgcactatatcctttctgcttcactaaataagcctttgctccattatgtctgcaactaactttcagatggttcaagaaaaaaaaaatttgtatacttacaaagaaaaggagtaacaggctgggtgcggtggctcacgcctataatcccaacactttgggaggccaaggtgggtggatcacgaggtcaggagttcgagaccagcctgaccaacatggtgaaaccccgtgtctactaaaaatacaaaaattagctgggcatggtggcgcgtgcctgtaatcccagctactcaggaggctgaggcaggagaatcgcttgaacctaggaggcggaggttgcagtgagctgacatcaccccactgcactccagcctgagcaacagagcaagactgtctcaaaaaaaaaaaaaagaaaaagaaaaaataataaaacaaatgttgcaaaatattaaaagttggtgaatgtgtgaaagatccgctaccttatttctactttctctgcatccttttcattttcatttaattttttaagtaggtaaaaatgtacatggctcaaaaacaaaaattttttaagttatttaatgaaaagtttctattctactcgattttcccagccacctagtctcttcctcctactctgaaataggttgtaactgttactaatttttcgtgtgtccttccagatatttttttgatgcatatgttttccatattgaaacaaatatattttgctctctttatcactaagatggtagactcttgcattttttatttctaaacagctgcttaatattaaaatgtatggatacattttaaaggtagaaagaggtaacatttatgatcccttcttagttttagatgttgagactggaaatgagtatgggaatttaaagcaagaagtttctgaagaaatggaaccacatgggaagacatccagtaaatttgaaaatgatatgtccaagtctgctaggtgtggagaaactcgtgaacctgaagaaataacagaagagccctctgcttgctccagagaagataaacaacctacctgtgatgaaaatggagtaagcctgactgagaactctgaccatactgaacatcagagaatctgtccaggagaagaatcttacggatgtgatgactgtggaaaagcttttagtcagcactcacacctcatagaacatcagaggatccatactggagacagaccctacaaatgcgaagaatgtggaaaagctttccgtgggagaactgtgcttattcgacacaaaataatacacactggagagaaaccgtataagtgtaatgaatgtggcaaagcctttggccggtggtcagctcttaaccaacatcagagacttcacacaggagaaaaacactatcactgtaatgactgtggcaaagcctttagtcagaaagcaggcctctttcaccatatcaagatccacacaagagacaaaccttatcagtgcactcagtgtaataaaagttttagtcggcgttccatacttactcagcatcaaggagttcataccggcgccaagccgtatgagtgcaacgagtgtggaaaagcctttgtttataactcatcccttgtttcccatcaggaaatccaccacaaagaaaaatgctatcagtgtaaggaatgtgggaaatccttcagtcagagtggccttattcagcatcagagaattcacactggggaaaaaccctacaaatgtgacgtatgtgaaaaagcctttattcaaaggacaagtcttacagaacatcagcgaattcacactggagaaagaccctataaatgtgataagtgtgggaaggcgtttactcaaagatcagtcctcacggaacatcagagaatccacactggagagaggccctacaagtgtgatgagtgtgggaatgccttccgaggaatcaccagcctcattcagcatcagagaatccacactggggagaagccctaccaatgtgatgagtgtggaaaagccttcagacagaggtcagatcttagtaaacaccagagaatccataatagacgtggtacctatgtatgtaaagagtgtgggaaatcattcaggcagaactcagctcttactcaacatcagactatccacaaaggagaaaaatctgtttctgtgtgatgactacagggaagttatctcacagagttcaggccagtgagaaatactatttagctttacaattattggggcaaaacttcagtcaccattgttataaggaaacctcagatatttaataagaattcactgtgtgctgcccattgtactacgtgctgtggagaacaagaagataaccccaaactcttttctcagagagtttgtagcctagtttgggatagataagatccacatatttagtcatataagactacaggagagtagaattgatgcaccagatggtgtcgaatgaaagtggtactttgtagactataagtgctgtaaattctaaaggacaggttacttttgcctggagtggtcaagaaagattttatttaaaataaggatttgacgggcagacttagcagtcaaaagggagaaagcgggtaaaacaaatgtaagccatcataagagtgcatgtggtttggaagcatcagggaaaagactagccaacctgaagtaaaaggttcgtgcaaattgggcaatcaatagcattaagttggaaacagcttggggacagacacataagagggccagagtgtgaataatttcatctaatactttatagcacttggacatttacagagcacttttctcaattcctaaaataccttggtaaatcaaaagcattctccattttaaaaatgagaatactcttgcctatggagatggcaacatagctataatcccacacaaagaaaaagaccagtaacctaagtgcaggtcttttgacttctagtcctggccattactctagtgatcctccaactttgatgaacatcaaaatcatgtttggagcttgtttaacatccctgaatcccactcacattctgcttcattaggcctaggatgggagttgagaatcttcatttttatagctccacagttacttaatatactttaaaatttgagaagcgttgagttgaatgacagctgacttcatggctgtctgcgaagtggggaagcctgaacacagtcctataaactaaaggccactgcagacttttagcacaaggagatccttacagggaacatgtgccatcagctctttggagtgaacaaggaattagacccccatcatgccaaaaaactaggatttttaggtggtctttccatcccttcagatttaagtattcaaagaaagagagacagacctacattccaagggtcttctgagtgcaaggccttgtgttgtttgtttatttaggggagggcctggtgctcttctctgttttatgctttaccttcttttatttctcagatctcatgttagcactatgttctgaattccctaataatggctcttgagaactgatttacattttgttggtttgtttacttcttgagcacataaaaggaccccaaattagagatactatcccttgggcttctgaaaaatgaatcaaccaaaactggttgactctaaccttgccttgctgagtaaaaattctgctttggatgagaacctgtcttgattattttagtggacaacagataagccacatggaagtacacatggctcctgatctgtctttttatttacagaaatcattcttaatctctactgagatggcctgttatttccttccttttctaccctgccacagcaaactccacagtttctgggactaacttcctactacaccccaacacaactccagtcctctcttctcttcacacttctagctggttagtgggtttgaagtggtgagacagtgacaaaaggggaaggggaaaaataaaagaagggtaatctgcattcttccttagtaagtcccactcctaattacctttctacacagccctgtgtctttgtcccatcttctcttcactcctgtaatatactccccagccccattttcttagtgcccctgtctcttgcctctctagccataaaccctgtatagaatttcatccctgggttggaactagaagcgtctctggtcctataggaatattatgtttctagctaagttgtaaatatgaacacatattcccatagaagtcataatggtataagtattataattcaggtatattaggtgtcaaattggcttctgggattggaacttacatgactttctgtgtggaaaaaccttcttgagttcacaagagagaaaggcaaatgaacagttgaaaaacaacttactcataagttgaggactgcttagttaggcttttttcataaccccagcattggagttgcacacatgaggcactgaggcaactgggattggaaacctagtttttttcctccaggaaacaaggaacccagagtgagtctgggagctctgtagctctaagtatgtgaggcctgtgctctacctaagtttaccctgcctcccatttctcacataatgagaatgcaaacttgtaaccaaaccaaggttcagctgcttgcggctccaaagccaaaactcgggagagaagaaaattggtgcgaggaaaagcagatttattcggagagccagcaaactgagacgatggtagactactgtcctaaagtaccatcttaagtcagtacaaatgttgggctcggctctttttatgttaagggcaaagggaagaggacagagttgggatgaagaggtgacctatgaccacagacatctgggcgccagcaagagtccaaggaggttgggaacttctttgtcattggttgggtcacaatgctcctgcaaatcttcaacaaaacataattgttatacatacttctttaatcccagagttagtttttaaaactacatgattgctgtttttgcatattatctctgctctaaaattagcctacatggaggaataggtaaagggtccttaaacaaaaatggagttagttatggtagttcttttgctgtttcactgttagaaactcttctcagtggaggggactttacttagtgatgagaacctgtgtgagaatgttctccttaccaaacatgctatgcatactccttatctaatctgattttatagacttgttatccaaactgaaattactgttcatagtaacttcagagcctctcttttaatctgactgctcgctggaatgcaatcgttgttttaaacttgccttctactcctctgagtgcctttacttggggtctttccagttcattttctgcttaatatgttctgtcattgcgcacattcctccatttgcctttctgcacactacttaatctttcttatatacctaatattataaagggaccataaacaaagactcagaacaatggaatatgcctattataggagggtacagttcatacttgtttaaaaataaatgtggaggctgggtgcagtggctcacacttataatcccagcactttgggaggccgaggtgggcggatcacgaggtcaggaggttgagaccatcttgacaatgtggtgaaaccccatctccactaaaaatacaaaaattaaccaggcgtggtggcacatgcctgtaatcccagctactcgagaggctgaggcaggagaatcgcttgaatccgggaggtggaggttgcagtgagctgagatggcaccactgctctcccgcctggtgacagagcaagactccatctcaacaaaaattaaaataaaaataaaaatacacgtgggggttttgttctggttatttctcatgcttaaatacagttgtagtaccaaaaaaaggtggagtgacatggaatttccaggtaggcatcaaagaggattaaactagctttccaggataaagaggaaatatagtagaataaggctactaattggagctaaattggcaatataggcaaattgaaggccctgaggggcaaatggaggatgtgacatgttagatatggaataggagtgctacattagggaatgcagtgaagagagaatgctttgtgatgaagtcaggagtacattttgtggataacatatagatgtggtgtgacagtgacaagatcctaggaaaccagaaacctctgaagcattttatgtatgtggattttgaaataacaataacggggtgggatggaaacgaagaatataaaagcgaagcaggtccaaggtagaaataacggtcatcaattgtagtaacaatggccagatagaagtatctgttgtaaaacttgaatgaatcataaagcttgcaaataatattaagaataagaataagattgactggcttgtcttttctaattgattcaaggtaaacaagacattaagtgtttaaggcaaaaagcatggagaggttggggaagagccaagtttctaaagtaatgaaaagtgaggtgagtttcaacacgggctatgaatgaaaacgtaacctgacaatcaaactgattccagagagtgcagtgggaattgactgcagaggaaaaaagaatggggccctccttccaaaaataaattgtattaagaggttgccagagtttgaggtacgagatgaagctaatgaggaaagacagtgggattgagcagggctccaaattgagacatctcaactgtataatgaggttggttgtagagacctctaagatagaagaacttagacaagtctgcattcctgtattcagtacagaagtagccacttttgttaatatacagattatttgtagagttgttatagtcaaaacaaagctgttcttattggccatcttttggaattgagaaaaggatttattaatgacaataccgcacacttattagctgcttactaagggccagacattactaaatgctttacttacaacatttcactttcagctggggaaactgaaatagataatctaaagctgctcaaggtcccgaagttagtatgtggtcaggccaagatttgaacccaagcagcccagttccagagttcacacttttaacctctgtgatacacttcctctctttatttcagttgaacaaaccatgtgttgcagtggtaattcagtgtcttgagtaattatctgtaaaaactttttatctccagtcattattctgaaaaatgattcagaaagtcctggagtccaaacacctcaggtaataatattatcaccccctctgcataccaaatcttggatgaggtttggccagcataaacagctctacttcttgttgcctgcacagtgagggtgtcacaggagacattccactttaaaaatgggctctttatatgaaaagatcacccttcttagaatgataaatcactctgcattattctcacagaataaggaatatttggctgtctaatttaatacagaaagatttaaagatttgtccccaagtgttgataacccattatggatctatctttaatgccagttttcaaaagtgattttatattagaagatacttcttggatttaaaaatgcacacacacacatatatgtgatatatgatatttttctttgcttaagacttaccaattttacagttcaaatggtgaccctcctaactccacaaggccagaatttgagcaaatgcttgttgttcaacctagacataatcattcgatagcctttaattgaatctcttcccaacttttatcctttaaaccgaaaagttatataccacagtcactacagcagctcattttattggaatttctttggatcctctccctctcaaacgttctgtgtgcgtttggtaaggagtcctcacacattattttttacttgtatagtatttctacatatatatataaatgtgtaaaaagtatgtatgaatatttttgtgttgtaatttgtattttacatatatatgacctcatgtatataatttgatgttgacaaagccaactatgataagtgttttaaacttttcagttgattagccccctagcttacattgtaagaccatcatttagagccagcagttttcccttgatttcatctcttgaagagacagttgattctcttcatacacgttaaaaacaccatttaggtgtcagaaacccatcagtcaaggctcccagagctttcacctatcatagttcaagttaatctctagggtatatgtctgtttgctcctgccagtcattttcctaagcccagttggcctgctcctggaagtcccaagaagggctccatagtggaagccatttgttacttttgatttatgattacatcatcattactcctcttcaagcttagtgggcatatcttagtgttttgatctagtgccttagttctgcctacttcagtaacgaatttaggagtagatgtctcctcatttcatccctgataaagattgaggcagtttagggactctgcagcttcctctggccaaattccctacttattcctgagatagggtttaagaacctggattctagagacggattgccatggttcgaatctcagtttactagctaagtgactttgggcaagggatttaacctctcgtccctcagtttcctcctatgtaaaatgacaaggataatagtaccaacccaatgtagattaaatgagtttacgaagtgttagaatagtgcttggcacattagtgctttacaactgctattttgattgttgttgtgggctctctcaaatgcattgtctctagatgccagtgacccaggtcaaaatttacctttaaccaagctgcatgtttcccagactgctgcacagtcctcctagccctgagataaaagctcccacccaggtatacttttactttcctgctggagaactgatgagcagtggccagcaggggacacttatcgcccaagctggaaaggagagatttcttcccttttgtctccgcccctgttagttatcagaggtacctagcggcccctgctatccgaagtttgccttccgagctgctcttccgacgttctgcagctggaaggccggcctcgcacgggtctgacgcgccccggcctgggagcatgggcccctggggttacctgactgctcagctggaacttgcgctgctcagctggggcggggttcggccgggcaaccacagagaggagaaagcctccagaatcctagagaagctgaatgctgagacagccgttgacggcagcggcacgtgaaagtaccgacctttctggcctttgtgacggacctttggaggcgggtggtttcagattcgtgcgctccggcctttcagtgtctctggtgaggttgggcctgataggttgagagctgccaggggaagttaaggatgacttccaagttttgaggtatcaggaaaactggctgttgagaaaaaggagtctgggttccccgtttggtgaaaggaaagttgggttcatttggggaaattatgtgattcatgattttcccaagatcgacgctgagtacaagaagagacagaatccacctagctgttgtgtgactttgagcaaattacttaatctctctgtgcctcagttttattcctctgtcagtgagattataagtgtctacttaaatggctgcatgcatggtgcattttaaataaatattagctgttgttatttttcatttctgatgttcttatctctgccgtttatacaggatattgcatgtatggtgcattttaaataaatattagccgttgttatttttcatttctgatgttcttatctctgccgtttatatgggtattttgaagtgggggggagccaagggaagagggtcatgatctttaaagttttattaataaaaacttttagagagtaaaaggctagcagatggggctagctaataatttgcagtcacttttgctttcctaatttatttaccttcctgacagagttccgttttctttcagtgccttgttcagataagtgagttcttggctaaagaagtaaacaaaatttagcttctgttaacattgttattttatgcctcaggaagaagaccagctacaaggaaatacttctgaaaaatcactctgaaccccaagctggagtgaatcttctcctgagctctctcattccagaatggcaatcttgtttcaggagagatctctaatagtgactgatggtaaaggaagaaggctgtgcctagaacaaagaatcaggctggcaaagaaatcacaggtctttcctcaaactttaaattgctactctctggagatagctacctggactttacagagctgtcagaagacttgggaaggtttgccagcattggaaaaagccacttggacttcacagagctgtcagaagacttaggaagctttgccagtagttcctgagaccagaaatacatattatgaagcaggtgctggaacaggccctggcccctacttgtgaagctgcagatataggtaagataatatcatccagaatgtggagacgaggcaatcgatgatgctggaaaagttgaagagagagtttgaatgaaggacaaaccaccgatgggaaagcttgggaggatcacttatagcttgactagcaaaaggctttgggaataggatagaaagcagcaaacctgaactttaggatccaccagatgtctctggagccataacccaacatttcccataaatagtaggttttaattctcctgttatttaggtgcatctctgggacctcctctttctatattgggttttttgtttgttgggtgttttaacttaggatttagcttcaaattccatttcccaagaccaattttatcacattgcctttaggtctcaggctaaatgatataacaagatatgcttttggcaaagatagtaccttggaatgaaaggtttcagatcaaacctaagatcctaccttagtttacctctcagtgttattgccttttgatatggaaagctgatgagagagcatctctggagagaaagaagaggagagcctcacgggaagcttttagaacttttagtagcatcctctccccagaaaacttgtctctactcatctccttctcattatctacctgattcgttaagtaggaaatctcagccatatttgtaggggattggggttttgttttttttgacccacttaactcctttagcttcaaagtgttgctttcttacattttagacatgaatattacctagaaaatttatttccccactgttaattttccagtttattgatttccccacatcagattagtgtgtattttgaaactggtttagctattgtttcaagttaactttgatcatatcccgttgtttactgatccactcaacaaatatttattgaacattctgtaggtttatagtagtagccaagatacttaaagtgagtagaaatagtccttttaactgtccttaacaaattaaactttctcttggtttcatgatattccttgtttctcagctttggattcaaactgatcttctcttttttgattatactttcctgatttcttttattgtcacatttttgtgaaaagtcttccatgcacttccagtctctttctgcctagctgtctcttctcacccaaattggacccccctactcctaccctgccacgtgccttcacaaaaatgagatgcttgtttagagacttagaaaaggcatgcactttaggtaaaagtggattttatttttaatcactgtaccctatcataaatctcatttcagaagagacaactgacatttgaattgtctgtgcattttgttttagatggtgttactgagaaggaaactaaggacttggctccaaaacaaaacaaaacaaaatctggagatgctgaattttgttggggggaatgtctgtagaactgcaacatcaatgcagtaagtgtagtaaaagctttagtttatggtgagtcattactcagcatcatggagtccacgatgaagagaatctcttttcaatctgtgcaatcaacaagtttttgaaaggcttttgtttatagtggaaccctcttttccccctagaagaaccaccacaaggaaaaatgctgtcaccataaggaatgtgggaaagttttcagccacatggccttatttgacttcaaagaatccacatgagagagagactgcataaatgtaataactgaggaggcctttgttcagcaaagaaaccttatacaaactcgtataaagaatgtaggaagaccttcacccagaagccaggactgactgtgcaccagagaatctgcacaataaacatgatgaatgtggagatgcttgcttcagcattggagaattcacagtaaagggaaaccctgccagtgtgatgagtacggaaaagtcttcagaggttggaacttgggaaaaatcagtgagtgaattcatattagagaggctcttataaatgagaggattgtggaaacttgtatagacagagatcagacctcaacaagggagcctccacagtattgaaaagttaatataattaatgtaagtgggcaagttgtatggggaatgggtagtctaaattgctcattttagccagtaaaaacattaaattagtttcttagatcaagaaaaggaaatgttagaagttatttttcccttccagaggggtctatatgtgtaagcaaccaggacttttgaaataagttgcatctctggatttgtgatctgtctcctggatgattatctctgttttgggagacaggtattttttcttcatgcctgctctagtctcatctcatatctttaattcattcagcaagtatacacaatagtattatcgtctactgtttgttgtaaatatatatatattattttctttttggtctgagtaggcttgtattggtaccctaggacataaaaatcacatatatcatgtttcagtaaatgcagtgaaaggaactatattattaaattgctgggaatttctgtaaatttgagactacctttatattctccaacacaagaccgtgtaggtgtcccttcagagagtatattcttctagcttggcttctttattttctttatttttttgagatggagtcttgctcctgtcgcccaggctggagtgcaatggcacgatctcggctcactgcaacctccgcctcccaggttcaagtgattctcctgtctcagtctcccgagtagctgggattacaggcacttgccaccattcccagctaatttttgtatttttagtagagacggggtttcaccatgttggccaggctggtctcgaactcctgaccttgtgatctgcccaccttggcctcccaaagttcagggattacaggcatgagccaccatgcccggctgtttttttaagatagaaaaatatacttcatgtatagcctattgacagataatgactgatattttttcttatagataacacataataaacattgtgaagactaataagtaacttgcttattcttttcagttctaaaacctgtaggaaagaatctttagaagctgtcaacaagttgataatgtagcccaatctctacccatgataggagagtaaggcttatatattttatagtagggcactaaatacaggaaccatgtatttaaaaactttttagtgattatctcagaattctaggtgtccctctgctgtacatccctaaattttttgcataggtattattaataaattcattattttcaaagatggactgtgttctgtaaaaagcttttccagtatctgcaaatcacacagttttttttaactctattactattatataaaatgatttcttaatattgaaccaaccttgcattcctagaataaacctcacttagccatga

SEQ ID NO: 645 - DNA, 13526 bp, Homo sapiens
caggcttatatctgggaaaaaggtcatttcagggttcagccactgccacaaatagtatactttttgttttctgttatcagagtgagtctgtcagctacatctcattttcctcaggtctcagtccacactggggaacaggaaatgttcttgcaggagacggtacgtctacgaaaagaaggagaacccagtatgtccctccagtccatgaaagcccagccaaagtatgaatctccagaacttgaatcccaacaggagcaaggtaaagaagaaagacccatcttgggaggaaggggaagatgggtaacataggacattggggcttttttgtacttgctactgtttctgatcattaaagtcaaaaaggccgtctcagaatctgatggctcatatatagactctcagacagcctagtttgtcactcttcaacccttacttttttgtatattcatattcttctaaattctggctttaccacttaatttagtccttctgatatttatctctctttatactgacctccttgctatttttagcctttatcctatcagacaatacctctatcttccacttgcactatatcctttctgcttcactaaataagcctttgctccattatgtctgcaactaactttcagatggttcaagaaaaaaaaaatttgtatacttacaaagaaaaggagtaacaggctgggtgcggtggctcacgcctataatcccaacactttgggaggccaaggtgggtggatcacgaggtcaggagttcgagaccagcctgaccaacatggtgaaaccccgtgtctactaaaaatacaaaaattagctgggcatggtggcgcgtgcctgtaatcccagctactcaggaggctgaggcaggagaatcgcttgaacctaggaggcggaggttgcagtgagctgacatcaccccactgcactccagcctgagcaacagagcaagactgtctcaaaaaaaaaaaaaagaaaaagaaaaaataataaaacaaatgttgcaaaatattaaaagttggtgaatgtgtgaaagatccgctaccttatttctactttctctgcatccttttcattttcatttaattttttaagtaggtaaaaatgtacatggctcaaaaacaaaaattttttaagttatttaatgaaaagtttctattctactcgattttcccagccacctagtctcttcctcctactctgaaataggttgtaactgttactaatttttcgtgtgtccttccagatatttttttgatgcatatgttttccatattgaaacaaatatattttgctctctttatcactaagatggtagactcttgcattttttatttctaaacagctgcttaatattaaaatgtatggatacattttaaaggtagaaagaggtaacatttatgatcccttcttagttttagatgttgagactggaaatgagtatgggaatttaaagcaagaagtttctgaagaaatggaaccacatgggaagacatccagtaaatttgaaaatgatatgtccaagtctgctaggtgtggagaaactcgtgaacctgaagaaataacagaagagccctctgcttgctccagagaagataaacaacctacctgtgatgaaaatggagtaagcctgactgagaactctgaccatactgaacatcagagaatctgtccaggagaagaatcttacggatgtgatgactgtggaaaagcttttagtcagcactcacacctcatagaacatcagaggatccatactggagacagaccctacaaatgcgaagaatgtggaaaagctttccgtgggagaactgtgcttattcgacacaaaataatacacactggagagaaaccgtataagtgtaatgaatgtggcaaagcctttggccggtggtcagctcttaaccaacatcagagacttcacacaggagaaaaacactatcactgtaatgactgtggcaaagcctttagtcagaaagcaggcctctttcaccatatcaagatccacacaagagacaaaccttatcagtgcactcagtgtaataaaagttttagtcggcgttccatacttactcagcatcaaggagttcataccggcgccaagccgtatgagtgcaacgagtgtggaaaagcctttgtttataactcatcccttgtttcccatcaggaaatccaccacaaagaaaaatgctatcagtgtaaggaatgtgggaaatccttcagtcagagtggccttattcagcatcagagaattcacactggggaaaaaccctacaaatgtgacgtatgtgaaaaagcctttattcaaaggacaagtcttacagaacatcagcgaattcacactggagaaagaccctataaatgtgataagtgtgggaaggcgtttactcaaagatcagtcctcacggaacatcagagaatccacactggagagaggccctacaagtgtgatgagtgtgggaatgccttccgaggaatcaccagcctcattcagcatcagagaatccacactggggagaagccctaccaatgtgatgagtgtggaaaagccttcagacagaggtcagatcttagtaaacaccagagaatccataatagacgtggtacctatgtatgtaaagagtgtgggaaatcattcaggcagaactcagctcttactcaacatcagactatccacaaaggagaaaaatctgtttctgtgtgatgactacagggaagttatctcacagagttcaggccagtgagaaatactatttagctttacaattattggggcaaaacttcagtcaccattgttataaggaaacctcagatatttaataagaattcactgtgtgctgcccattgtactacgtgctgtggagaacaagaagataaccccaaactcttttctcagagagtttgtagcctagtttgggatagataagatccacatatttagtcatataagactacaggagagtagaattgatgcaccagatggtgtcgaatgaaagtggtactttgtagactataagtgctgtaaattctaaaggacaggttacttttgcctggagtggtcaagaaagattttatttaaaataaggatttgacgggcagacttagcagtcaaaagggagaaagcgggtaaaacaaatgtaagccatcataagagtgcatgtggtttggaagcatcagggaaaagactagccaacctgaagtaaaaggttcgtgcaaattgggcaatcaatagcattaagttggaaacagcttggggacagacacataagagggccagagtgtgaataatttcatctaatactttatagcacttggacatttacagagcacttttctcaattcctaaaataccttggtaaatcaaaagcattctccattttaaaaatgagaatactcttgcctatggagatggcaacatagctataatcccacacaaagaaaaagaccagtaacctaagtgcaggtcttttgacttctagtcctggccattactctagtgatcctccaactttgatgaacatcaaaatcatgtttggagcttgtttaacatccctgaatcccactcacattctgcttcattaggcctaggatgggagttgagaatcttcatttttatagctccacagttacttaatatactttaaaatttgagaagcgttgagttgaatgacagctgacttcatggctgtctgcgaagtggggaagcctgaacacagtcctataaactaaaggccactgcagacttttagcacaaggagatccttacagggaacatgtgccatcagctctttggagtgaacaaggaattagacccccatcatgccaaaaaactaggatttttaggtggtctttccatcccttcagatttaagtattcaaagaaagagagacagacctacattccaagggtcttctgagtgcaaggccttgtgttgtttgtttatttaggggagggcctggtgctcttctctgttttatgctttaccttcttttatttctcagatctcatgttagcactatgttctgaattccctaataatggctcttgagaactgatttacattttgttggtttgtttacttcttgagcacataaaaggaccccaaattagagatactatcccttgggcttctgaaaaatgaatcaaccaaaactggttgactctaaccttgccttgctgagtaaaaattctgctttggatgagaacctgtcttgattattttagtggacaacagataagccacatggaagtacacatggctcctgatctgtctttttatttacagaaatcattcttaatctctactgagatggcctgttatttccttccttttctaccctgccacagcaaactccacagtttctgggactaacttcctactacaccccaacacaactccagtcctctcttctcttcacacttctagctggttagtgggtttgaagtggtgagacagtgacaaaaggggaaggggaaaaataaaagaagggtaatctgcattcttccttagtaagtcccactcctaattacctttctacacagccctgtgtctttgtcccatcttctcttcactcctgtaatatactccccagccccattttcttagtgcccctgtctcttgcctctctagccataaaccctgtatagaatttcatccctgggttggaactagaagcgtctctggtcctataggaatattatgtttctagctaagttgtaaatatgaacacatattcccatagaagtcataatggtataagtattataattcaggtatattaggtgtcaaattggcttctgggattggaacttacatgactttctgtgtggaaaaaccttcttgagttcacaagagagaaaggcaaatgaacagttgaaaaacaacttactcataagttgaggactgcttagttaggcttttttcataaccccagcattggagttgcacacatgaggcactgaggcaactgggattggaaacctagtttttttcctccaggaaacaaggaacccagagtgagtctgggagctctgtagctctaagtatgtgaggcctgtgctctacctaagtttaccctgcctcccatttctcacataatgagaatgcaaacttgtaaccaaaccaaggttcagctgcttgcggctccaaagccaaaactcgggagagaagaaaattggtgcgaggaaaagcagatttattcggagagccagcaaactgagacgatggtagactactgtcctaaagtaccatcttaagtcagtacaaatgttgggctcggctctttttatgttaagggcaaagggaagaggacagagttgggatgaagaggtgacctatgaccacagacatctgggcgccagcaagagtccaaggaggttgggaacttctttgtcattggttgggtcacaatgctcctgcaaatcttcaacaaaacataattgttatacatacttctttaatcccagagttagtttttaaaactacatgattgctgtttttgcatattatctctgctctaaaattagcctacatggaggaataggtaaagggtccttaaacaaaaatggagttagttatggtagttcttttgctgtttcactgttagaaactcttctcagtggaggggactttacttagtgatgagaacctgtgtgagaatgttctccttaccaaacatgctatgcatactccttatctaatctgattttatagacttgttatccaaactgaaattactgttcatagtaacttcagagcctctcttttaatctgactgctcgctggaatgcaatcgttgttttaaacttgccttctactcctctgagtgcctttacttggggtctttccagttcattttctgcttaatatgttctgtcattgcgcacattcctccatttgcctttctgcacactacttaatctttcttatatacctaatattataaagggaccataaacaaagactcagaacaatggaatatgcctattataggagggtacagttcatacttgtttaaaaataaatgtggaggctgggtgcagtggctcacacttataatcccagcactttgggaggccgaggtgggcggatcacgaggtcaggaggttgagaccatcttgacaatgtggtgaaaccccatctccactaaaaatacaaaaattaaccaggcgtggtggcacatgcctgtaatcccagctactcgagaggctgaggcaggagaatcgcttgaatccgggaggtggaggttgcagtgagctgagatggcaccactgctctcccgcctggtgacagagcaagactccatctcaacaaaaattaaaataaaaataaaaatacacgtgggggttttgttctggttatttctcatgcttaaatacagttgtagtaccaaaaaaaggtggagtgacatggaatttccaggtaggcatcaaagaggattaaactagctttccaggataaagaggaaatatagtagaataaggctactaattggagctaaattggcaatataggcaaattgaaggccctgaggggcaaatggaggatgtgacatgttagatatggaataggagtgctacattagggaatgcagtgaagagagaatgctttgtgatgaagtcaggagtacattttgtggataacatatagatgtggtgtgacagtgacaagatcctaggaaaccagaaacctctgaagcattttatgtatgtggattttgaaataacaataacggggtgggatggaaacgaagaatataaaagcgaagcaggtccaaggtagaaataacggtcatcaattgtagtaacaatggccagatagaagtatctgttgtaaaacttgaatgaatcataaagcttgcaaataatattaagaataagaataagattgactggcttgtcttttctaattgattcaaggtaaacaagacattaagtgtttaaggcaaaaagcatggagaggttggggaagagccaagtttctaaagtaatgaaaagtgaggtgagtttcaacacgggctatgaatgaaaacgtaacctgacaatcaaactgattccagagagtgcagtgggaattgactgcagaggaaaaaagaatggggccctccttccaaaaataaattgtattaagaggttgccagagtttgaggtacgagatgaagctaatgaggaaagacagtgggattgagcagggctccaaattgagacatctcaactgtataatgaggttggttgtagagacctctaagatagaagaacttagacaagtctgcattcctgtattcagtacagaagtagccacttttgttaatatacagattatttgtagagttgttatagtcaaaacaaagctgttcttattggccatcttttggaattgagaaaaggatttattaatgacaataccgcacacttattagctgcttactaagggccagacattactaaatgctttacttacaacatttcactttcagctggggaaactgaaatagataatctaaagctgctcaaggtcccgaagttagtatgtggtcaggccaagatttgaacccaagcagcccagttccagagttcacacttttaacctctgtgatacacttcctctctttatttcagttgaacaaaccatgtgttgcagtggtaattcagtgtcttgagtaattatctgtaaaaactttttatctccagtcattattctgaaaaatgattcagaaagtcctggagtccaaacacctcaggtaataatattatcaccccctctgcataccaaatcttggatgaggtttggccagcataaacagctctacttcttgttgcctgcacagtgagggtgtcacaggagacattccactttaaaaatgggctctttatatgaaaagatcacccttcttagaatgataaatcactctgcattattctcacagaataaggaatatttggctgtctaatttaatacagaaagatttaaagatttgtccccaagtgttgataacccattatggatctatctttaatgccagttttcaaaagtgattttatattagaagatacttcttggatttaaaaatgcacacacacacatatatgtgatatatgatatttttctttgcttaagacttaccaattttacagttcaaatggtgaccctcctaactccacaaggccagaatttgagcaaatgcttgttgttcaacctagacataatcattcgatagcctttaattgaatctcttcccaacttttatcctttaaaccgaaaagttatataccacagtcactacagcagctcattttattggaatttctttggatcctctccctctcaaacgttctgtgtgcgtttggtaaggagtcctcacacattattttttacttgtatagtatttctacatatatatataaatgtgtaaaaagtatgtatgaatatttttgtgttgtaatttgtattttacatatatatgacctcatgtatataatttgatgttgacaaagccaactatgataagtgttttaaacttttcagttgattagccccctagcttacattgtaagaccatcatttagagccagcagttttcccttgatttcatctcttgaagagacagttgattctcttcatacacgttaaaaacaccatttaggtgtcagaaacccatcagtcaaggctcccagagctttcacctatcatagttcaagttaatctctagggtatatgtctgtttgctcctgccagtcattttcctaagcccagttggcctgctcctggaagtcccaagaagggctccatagtggaagccatttgttacttttgatttatgattacatcatcattactcctcttcaagcttagtgggcatatcttagtgttttgatctagtgccttagttctgcctacttcagtaacgaatttaggagtagatgtctcctcatttcatccctgataaagattgaggcagtttagggactctgcagcttcctctggccaaattccctacttattcctgagatagggtttaagaacctggattctagagacggattgccatggttcgaatctcagtttactagctaagtgactttgggcaagggatttaacctctcgtccctcagtttcctcctatgtaaaatgacaaggataatagtaccaacccaatgtagattaaatgagtttacgaagtgttagaatagtgcttggcacattagtgctttacaactgctattttgattgttgttgtgggctctctcaaatgcattgtctctagatgccagtgacccaggtcaaaatttacctttaaccaagctgcatgtttcccagactgctgcacagtcctcctagccctgagataaaagctcccacccaggtatacttttactttcctgctggagaactgatgagcagtggccagcaggggacacttatcgcccaagctggaaaggagagatttcttcccttttgtctccgcccctgttagttatcagaggtacctagcggcccctgctatccgaagtttgccttccgagctgctcttccgacgttctgcagctggaaggccggcctcgcacgggtctgacgcgccccggcctgggagcatgggcccctggggttacctgactgctcagctggaacttgcgctgctcagctggggcggggttcggccgggcaaccacagagaggagaaagcctccagaatcctagagaagctgaatgctgagacagccgttgacggcagcggcacgtgaaagtaccgacctttctggcctttgtgacggacctttggaggcgggtggtttcagattcgtgcgctccggcctttcagtgtctctggtgaggttgggcctgataggttgagagctgccaggggaagttaaggatgacttccaagttttgaggtatcaggaaaactggctgttgagaaaaaggagtctgggttccccgtttggtgaaaggaaagttgggttcatttggggaaattatgtgattcatgattttcccaagatcgacgctgagtacaagaagagacagaatccacctagctgttgtgtgactttgagcaaattacttaatctctctgtgcctcagttttattcctctgtcagtgagattataagtgtctacttaaatggctgcatgcatggtgcattttaaataaatattagctgttgttatttttcatttctgatgttcttatctctgccgtttatacaggatattgcatgtatggtgcattttaaataaatattagccgttgttatttttcatttctgatgttcttatctctgccgtttatatgggtattttgaagtgggggggagccaagggaagagggtcatgatctttaaagttttattaataaaaacttttagagagtaaaaggctagcagatggggctagctaataatttgcagtcacttttgctttcctaatttatttaccttcctgacagagttccgttttctttcagtgccttgttcagataagtgagttcttggctaaagaagtaaacaaaatttagcttctgttaacattgttattttatgcctcaggaagaagaccagctacaaggaaatacttctgaaaaatcactctgaaccccaagctggagtgaatcttctcctgagctctctcattccagaatggcaatcttgtttcaggagagatctctaatagtgactgatggtaaaggaagaaggctgtgcctagaacaaagaatcaggctggcaaagaaatcacaggtctttcctcaaactttaaattgctactctctggagatagctacctggactttacagagctgtcagaagacttgggaaggtttgccagcattggaaaaagccacttggacttcacagagctgtcagaagacttaggaagctttgccagtagttcctgagaccagaaatacatattatgaagcaggtgctggaacaggccctggcccctacttgtgaagctgcagatataggtaagataatatcatccagaatgtggagacgaggcaatcgatgatgctggaaaagttgaagagagagtttgaatgaaggacaaaccaccgatgggaaagcttgggaggatcacttatagcttgactagcaaaaggctttgggaataggatagaaagcagcaaacctgaactttaggatccaccagatgtctctggagccataacccaacatttcccataaatagtaggttttaattctcctgttatttaggtgcatctctgggacctcctctttctatattgggttttttgtttgttgggtgttttaacttaggatttagcttcaaattccatttcccaagaccaattttatcacattgcctttaggtctcaggctaaatgatataacaagatatgcttttggcaaagatagtaccttggaatgaaaggtttcagatcaaacctaagatcctaccttagtttacctctcagtgttattgccttttgatatggaaagctgatgagagagcatctctggagagaaagaagaggagagcctcacgggaagcttttagaacttttagtagcatcctctccccagaaaacttgtctctactcatctccttctcattatctacctgattcgttaagtaggaaatctcagccatatttgtaggggattggggttttgttttttttgacccacttaactcctttagcttcaaagtgttgctttcttacattttagacatgaatattacctagaaaatttatttccccactgttaattttccagtttattgatttccccacatcagattagtgtgtattttgaaactggtttagctattgtttcaagttaactttgatcatatcccgttgtttactgatccactcaacaaatatttattgaacattctgtaggtttatagtagtagccaagatacttaaagtgagtagaaatagtccttttaactgtccttaacaaattaaactttctcttggtttcatgatattccttgtttctcagctttggattcaaactgatcttctcttttttgattatactttcctgatttcttttattgtcacatttttgtgaaaagtcttccatgcacttccagtctctttctgcctagctgtctcttctcacccaaattggacccccctactcctaccctgccacgtgccttcacaaaaatgagatgcttgtttagagacttagaaaaggcatgcactttaggtaaaagtggattttatttttaatcactgtaccctatcataaatctcatttcagaagagacaactgacatttgaattgtctgtgcattttgttttagatggtgttactgagaaggaaactaaggacttggctccaaaacaaaacaaaacaaaatctggagatgctgaattttgttggggggaatgtctgtagaactgcaacatcaatgcagtaagtgtagtaaaagctttagtttatggtgagtcattactcagcatcatggagtccacgatgaagagaatctcttttcaatctgtgcaatcaacaagtttttgaaaggcttttgtttatagtggaaccctcttttccccctagaagaaccaccacaaggaaaaatgctgtcaccataaggaatgtgggaaagttttcagccacatggccttatttgacttcaaagaatccacatgagagagagactgcataaatgtaataactgaggaggcctttgttcagcaaagaaaccttatacaaactcgtataaagaatgtaggaagaccttcacccagaagccaggactgactgtgcaccagagaatctgcacaataaacatgatgaatgtggagatgcttgcttcagcattggagaattcacagtaaagggaaaccctgccagtgtgatgagtacggaaaagtcttcagaggttggaacttgggaaaaatcagtgagtgaattcatattagagaggctcttataaatgagaggattgtggaaacttgtatagacagagatcagacctcaacaagggagcctccacagtattgaaaagttaatataattaatgtaagtgggcaagttgtatggggaatgggtagtctaaattgctcattttagccagtaaaaacattaaattagtttcttagatcaagaaaaggaaatgttagaagttatttttcccttccagaggggtctatatgtgtaagcaaccaggacttttgaaataagttgcatctctggatttgtgatctgtctcctggatgattatctctgttttgggagacaggtattttttcttcatgcctgctctagtctcatctcatatctttaattcattcagcaagtatacacaatagtattatcgtctactgtttgttgtaaatatatatatattattttctttttggtctgagtaggcttgtattggtaccctaggacataaaaatcacatatatcatgtttcagtaaatgcagtgaaaggaactatattattaaattgctgggaatttctgtaaatttgagactacctttatattctccaacacaagaccgtgtaggtgtcccttcagagagtatatttttct

SEQ ID NO: 646 - DNA, 781 bp, Homo sapiens
tgagatggagtcttgctcctgtcgcccaggctggagtgcaatggcacgatctcggctcactgcaacctccgcctcccaggttcaagtgattctcctgtctcagtctcccgagtagctgggattacaggcacttgccaccattcccagctaatttttgtatttttagtagagacggggtttcaccatgttggccaggctggtctcgaactcctgaccttgtgatctgcccaccttggcctcccaaagttcagggattacaggcatgagccaccatgcccggctgtttttttaagatagaaaaatatacttcatgtatagcctattgacagataatgactgatattttttcttatagataacacataataaacattgtgaagactaataagtaacttgcttattcttttcagttctaaaacctgtaggaaagaatctttagaagctgtcaacaagttgataatgtagcccaatctctacccatgataggagagtaaggcttatatattttatagtagggcactaaatacaggaaccatgtatttaaaaactttttagtgattatctcagaattctaggtgtccctctgctgtacatccctaaattttttgcataggtattattaataaattcattattttcaaagatggactgtgttctgtaaaaagcttttccagtatctgcaaatcacacagttttttttaactctattactattatataaaatgatttcttaatattgaaccaaccttgcattcctagaataaacctcacttagccatga

SEQ ID NO: 647 - DNA, 102 bp, Homo sapiens
ttttgagacgcagtctcactctgttgccaggctggagtgcagtggcataaccttggctcactgcaacctctgcctcccgggttcaagcaattctcctgcctc

SEQ ID NO: 648 - DNA, 360 bp, Homo sapiens
gaaacaggagagggtatggctgcattaatggacattgtccacagacgcaaattttcctcagttaagacagttttgcaatgccacttctgcttgttggccagtggaaaccatttttaaatatgtcaaagaaatatatttgagggtaaaatattttgattttcttcagtccccactttgaaatttaaaacaagtttcacatactaaaagccaaggtaatagctttggggagatttaagttagaggtgtttagatagagacagtcatagcagtggaaaaacacatttgggataaatataaatgagcaaatttaaatatatcattccatattttctttaggcagtcccttggttttgaggtgag

SEQ ID NO: 649 - DNA, 360 bp, Homo sapiens; identical to SEQ ID NO: 648

SEQ ID NO: 650 - DNA, 353 bp, Homo sapiens
gtgagcaacatggctgtttatttcacctgggtgcaggcgggctgagtcctaaaagagagtcagtgaagggagataagggtggggccattttataggatttggatagataaaagaaaagtacagtcaaaggggggttgttctctggcaggcagagtgggggtcacaaggtgctcagtaggggagctattgagccaggatgagccaggagaaggaatttcacaagacagtgtcatcagttaaggcaggaacaggccattttcccatcttttgtggtggaatgtcatcagtaaggcaggaaccggccatctggatgtgtacatgcaggtcacgggatatgatggcttagcttaggc

SEQ ID NO: 651 - DNA, 382 bp, Homo sapiens
cttgatagcatttttatctttcttgatcatataataatggtatgccttacaattgatagcaccttagattttctgaaatacaagcatgagttcaaattcaccgtaatgaaagattgtaaattgggagacataatctccttcattgtgttattccttgttaaatcataaaaatacaccagtgtattgcgtatgttaaagataaatgccactttgaaattcaataagaaattttcttatagttctgtaacatgttctttcaaaggggtagaacataaaattcactcatttagacttacatttcataaaagtctagaattactctatcatatagaaaatactattgtaacataaggaattaagtggaaacatttaaactttaaaa

SEQ ID NO: 652 - DNA, 449 bp, Homo sapiens
ttgcttatgagcatagcatagtgtagtgattaggaattggaagacctgattttaatgtagttccatcagtaactagctctgatctttagtacattctctctgttgctcctttacctataaacttggaataagttttttccaattatctcatttggttttgaggtaaaatgagactatatatgaaagtgctttgaaaagtacagaagcatcaatttgaagacattgggtggggggtgtttaatgaaattgataaaataccatgacatttgggtgggtgaagttcattgccaaggtctccctttatctctttttcattcaggatttaatacttagttattatcttagagaaagcaaagtaacataacccattaactcatatttgtctttcctttgacctccagttaacttttgatatataagtaaatttgtgttttgagtttatagtaagc

SEQ ID NO: 653 - DNA, 2844 bp, Homo sapiens
tagctgattatttaaggagtaaaacaatgtctttgtgtatactttattcgaaataatagatgaagggaacatcgctgcctggataaaatgaggaatgctaattctagtatttctagaggatttgtgtttgaattgactattattataatgattagagtttaaaggaatcttaaagatgatcagattcacccccttcctttcatctctcttgttgccctgagagattagctacttgtctgttacggtgctggtccattaggactgtagtccagatctcggtcactaggccagctgcctgtctgctgtgtgatgctgatgcatttcagccttttttcttttttaaaaaccctaattggaagcattttataagaggttttaatatttagtccaaatatagagactaattaaggaattactcatgatattttatgaagtattgatgtgcttatcggtaaaatatgtcataaaaaccatgagcaatggaaagcaccttatgtttgaatttaagcatcctcatgaaatggtttaatatttagtgagtaggcgtgatgtttcctcaattagagatgaggaaataatgtcttgtaaagaatggaaaataaatgaaaatataggcagttttctataaaattgactccttaccgttatccctttctctctttaaggatgaattcaaaatgtggttttgtgcaaaaattcgcgttctttctttggaaacttacccagtttcaagtccaaaatctatgtctaataagctttcaaatggccatgcagtttgtttaattgagaatcccactgaagaaaataggcacaggatcagtaaatattcacagactgaatcacaacaggtattgtgatcttaatgtcaaagtttctttaaaaatcagaattgttacattttatgctatcatgtatattctataattttgtgtttgcagttaatgcttgagataaatttacctgcatataaaatattacatattactatatataatgctatatataatcctatatatagctgttaatagaagtaacagattacatatcacaagtgattatatgctttttggtgtaacgtttatttgtgttccacagattcgttatttcacccaccatagtgtaaaatatttctggaatgataccattcacaattttgatttcttaaagtaagtatcttccttttgtttggattgtattttgaatatcctgaaaacgttctagatagaaaagagtccattctagtattcataaaattgctgaggttttattttataatttctattcacgtattaattaacaactccctgttgctgtttgaaggctcattagccattttaaaataagtcccaccgcagcttgcaccatggcagagtttacatgaaacttagagtcagtatgatgccaaagtctactgagtctgagttcttacctgtttcacctcaaagtgattttgagtatacctcatagcctgtgtctcaacttagagtatctgaatcattacctgttggtttactgacacttaaagcctgtggtacttgaggagtagagtaataggcaaagagaaatttaattttactatgtagataaagaatggggcaagctgtagtaattcctttatttttaatcgaggatttaagttatataagtacacattaagattctgtttttattgctcttaaaatgattattataaatactcattaatatcgttgctttagagtgccaaaggaattcttaattttagcggtaaaaagaaaatcatgttatgaacatttaaaatattcatacctgtaggtttctattggaagtaaaaaataaaatattcatacctggattttttactcagatacactaatgaattggaacattctggaatgggcatgggcatttttacatgcctagttttaaaaaccattcctgattaagaactattgccttaaagaaaatcaggccgggcatggtgtctcatgcctgtaattctagcattttaagaggccaaggcgggcggatcacctgaggtgaggagttcaagaccagcctggccaacacggtgaaaccccgtccctactaaaaatacaaaaaaaattagcctggtgatggatggctataatcccaaatactcaggaggttgaggcaggagaatcgctcaaacccagggggccggaggttgcagtgagctgatactgtgccactccgttccagcctgggccaaagagcgaaactgcgtctcataaaaacaaagaaaattgccaatgggctgtcattttgtttaaaaaaaaaatttttttttttttttgacttggcactggcccctgctgccttctggagaagtcatcaaattcagtgggaagaaatgtcaaacatatttactgtgtgtcttttgccagccatagaaacttaaaaatttaaacttactccattgattgaagtgaattatgaagcttagctttcctatgtggaaagtgtggaaaaggattggaattaagtatatgtaagactttctttgctttagagttatagctggtatctcagttaaaataagcataattaaggcggggggtggtggctcatgcctgtaatcccagcactttgggaggccaaggtgggcggatcacctgaggtcaagagcttgagaccattctggccaacgtggtgaaaccccttctctactaaaattacaaaaattagctaggcatggtggtgtgtgcctgtactcctaactactcaggaggctgaggcaggagaatggcttgaacccaggaggcggaggttgcagtgagccgagattgtgccactgcactccagcctggcgacagagcaaaactccatctcaaaaaaaaaaaa

SEQ ID NO: 654 - DNA, 303 bp, Homo sapiens
agtggggttctattgctgggccttctgctttgttctgttgatcaatttatctagtcccatgctagtacttcatgaagtttttgtaatatttttcttctccagaaaggccagcactcccctcctccctccctgtcttctcacacttcataaatttatggtttcttttggttgtttattcatccatataaattactgcattctaaaaaaacattttttggaattttggttggagttacgttgaagctatatatcgatttgaagactatgacatatttattgaggtttccagtccacaagaatggt

SEQ ID NO: 655 - DNA, 303 bp, Homo sapiens; identical to SEQ ID NO: 654

SEQ ID NO: 656 - DNA, 337 bp, Homo sapiens
ccataaaaaagaatacagtcttgtcctttgtagcaacatggatgcagctggaggtcattatcctaagcaaattaatgtgggaacagaaaaccaaacactgcatgttctcatctgtaagtgggagctaaatgctgagtacatatggacacaaagatgggaataataaacactggggattccaaaaaggggagggggggagggagggagggagcaaaggttgacaaagtattgggtactatgttcactacctgggcaatgaggtcattaaaagcccaaacctctgcatcatgaaacatacccatgtaacaaactgcaccggtacccctgaatataaaaa

SEQ ID NO: 657 - DNA, 346 bp, Homo sapiens
aataataaataagcaatatttattacaacctccaactttcacatgagaaactaaggcttaggccgcgtgcagtagtgtactcccagcacttagggaggccaaggcaggcagatcacctgaggtcaggaattcaagagcagcctggccaacatggcaaaactttggctctactaaaaatacaaaaattagtcaggtgtggtggcatgtgcctgtagccccagctactcaggaggctgaggcaggagaatcacttgaacttgggaggtggaggttgccgtgaactgagatcatgccactgcactccagcctgggcggcagagtgaaactctgtctcaaaaaaaaaaaa

SEQ ID NO: 658 - DNA, 492 bp, Homo sapiens
gatgacatttcatcttaggaatgtgccatgattttttttcaactggtcctttttgttctttgcctctactgcaatattctgctcataggaataatagtacaatgaacgtctttgcaaataaatttgtgtgtgcatgtctgattatctttctagaataagctcttagaaatggagttactgggtcaaagatcataaacattttagaggcttttggtacaagttgtgagattgcaggtgacaaatgaccttctttccttaaatttagaaaagttgttttggggctataaatttgggagaaatgggtcatctaaatcatctgtgggaatttgtgctttcatagtttctgttacagaagtcaggcttctctaagcttgctggaggcagtgaacacagagaaaaagaggaaagacaaactttggagattaaattgtagctacttacttgctttatgaccttgagcagctatttattcatttttctcttctagttaac

What is claimed is:

1. An isolated nucleic acid molecule comprising a polynucleotide having a nucleotide sequence at least 95% identical to a sequence selected from the group consisting of:
(a) a polynucleotide fragment of SEQ ID NO:X or a polynucleotide fragment of the cDNA sequence contained in Clone ID NO:Z, which is hybridizable to SEQ ID NO:X;
(b) a polynucleotide encoding a polypeptide fragment of SEQ ID NO:Y or a polypeptide fragment encoded by the cDNA sequence contained in cDNA Clone ID NO:Z, which is hybridizable to SEQ ID NO:X;
(c) a polynucleotide encoding a polypeptide fragment of a polypeptide encoded by SEQ ID NO:X or a polypeptide fragment encoded by the cDNA sequence contained in cDNA Clone ID NO:Z, which is hybridizable to SEQ ID NO:X;
(d) a polynucleotide encoding a polypeptide domain of SEQ ID NO:Y or a polypeptide domain encoded by the cDNA sequence contained in cDNA Clone ID NO:Z, which is hybridizable to SEQ ID NO:X;
(e) a polynucleotide encoding a polypeptide epitope of SEQ ID NO:Y or a polypeptide epitope encoded by the cDNA sequence contained in cDNA Clone ID NO:Z, which is hybridizable to SEQ ID NO:X;
(f) a polynucleotide encoding a polypeptide of SEQ ID NO:Y or the cDNA sequence contained in cDNA Clone ID NO:Z, which is hybridizable to SEQ ID NO:X, having biological activity;
(g) a polynucleotide which is a variant of SEQ ID NO:X;
(h) a polynucleotide which is an allelic variant of SEQ ID NO:X;
(i) a polynucleotide which encodes a species homologue of the SEQ ID NO:Y;
(j) a polynucleotide capable of hybridizing under stringent conditions to any one of the polynucleotides specified in (a)-(i), wherein said polynucleotide does not hybridize under stringent conditions to a nucleic acid molecule having a nucleotide sequence of only A residues or of only T residues.

2. The isolated nucleic acid molecule of claim 1, wherein the polynucleotide fragment comprises a nucleotide sequence encoding a protein.

3. The isolated nucleic acid molecule of claim 1, wherein the polynucleotide fragment comprises a nucleotide sequence encoding the sequence identified as SEQ ID NO:Y or the polypeptide encoded by the cDNA sequence contained in cDNA Clone ID NO:Z, which is hybridizable to SEQ ID NO:X.

4. The isolated nucleic acid molecule of claim 1, wherein the polynucleotide fragment comprises the entire nucleotide sequence of SEQ ID NO:X or the cDNA sequence contained in cDNA Clone ID NO:Z, which is hybridizable to SEQ ID NO:X.

5. The isolated nucleic acid molecule of claim 2, wherein the nucleotide sequence comprises sequential nucleotide deletions from either the C-terminus or the N-terminus.

6. The isolated nucleic acid molecule of claim 3, wherein the nucleotide sequence comprises sequential nucleotide deletions from either the C-terminus or the N-terminus.

7. A recombinant vector comprising the isolated nucleic acid molecule of claim 1.

8. A method of making a recombinant host cell comprising the isolated nucleic acid molecule of claim 1.

9. A recombinant host cell produced by the method of claim 8.

10. The recombinant host cell of claim 9 comprising vector sequences.

11. An isolated polypeptide comprising an amino acid sequence at least 90% identical to a sequence selected from the group consisting of:
(a) a polypeptide fragment of SEQ ID NO:Y or the encoded sequence contained in cDNA Clone ID NO:Z;
(b) a polypeptide fragment of SEQ ID NO:Y or the encoded sequence contained in cDNA Clone ID NO:Z, having biological activity;
(c) a polypeptide domain of SEQ ID NO:Y or the encoded sequence contained in cDNA Clone ID NO:Z;
(d) a polypeptide epitope of SEQ ID NO:Y or the encoded sequence contained in cDNA Clone ID NO:Z;
(e) a full length protein of SEQ ID NO:Y or the encoded sequence contained in cDNA Clone ID NO:Z;
(f) a variant of SEQ ID NO:Y;
(g) an allelic variant of SEQ ID NO:Y; or
(h) a species homologue of the SEQ ID NO:Y.

12. The isolated polypeptide of claim 11, wherein the full length protein comprises sequential amino acid deletions from either the C-terminus or the N-terminus.

13. An isolated antibody that binds specifically to the isolated polypeptide of claim 11.

14. A recombinant host cell that expresses the isolated polypeptide of claim 11.

15. A method of making an isolated polypeptide comprising:
(a) culturing the recombinant host cell of claim 14 under conditions such that said polypeptide is expressed; and
(b) recovering said polypeptide.

16. The polypeptide produced by claim 15.

17. A method for preventing, treating, or ameliorating a medical condition, comprising administering to a mammalian subject a therapeutically effective amount of the polynucleotide of claim 1.

18. A method of diagnosing a pathological condition or a susceptibility to a pathological condition in a subject comprising:
(a) determining the presence or absence of a mutation in the polynucleotide of claim 1; and
(b) diagnosing a pathological condition or a susceptibility to a pathological condition based on the presence or absence of said mutation.

19. A method of diagnosing a pathological condition or a susceptibility to a pathological condition in a subject comprising:
(a) determining the presence or amount of expression of the polypeptide of claim 11 in a biological sample; and
(b) diagnosing a pathological condition or a susceptibility to a pathological condition based on the presence or amount of expression of the polypeptide.

20. A method for identifying a binding partner to the polypeptide of claim 11 comprising:
(a) contacting the polypeptide of claim 11 with a binding partner; and
(b) determining whether the binding partner effects an activity of the polypeptide.

21. The gene corresponding to the cDNA sequence of SEQ ID NO:Y.

22. A method of identifying an activity in a biological assay, wherein the method comprises:
(a) expressing SEQ ID NO:X in a cell;
(b) isolating the supernatant;
(c) detecting an activity in a biological assay; and
(d) identifying the protein in the supernatant having the activity.

23. The product produced by the method of claim 20.

24. A method for preventing, treating, or ameliorating a medical condition, comprising administering to a mammalian subject a therapeutically effective amount of the polypeptide of claim 11.
